(19) United States
(12) Patent Application Publication
(10) Pub. No.: US 2021/0155927 A1
(43) Pub. Date: May 27, 2021

(54) METHODS FOR TREATING SICKLE CELL DISEASE

(71) Applicant: The Regents of the University of California, Oakland, CA (US)

(72) Inventors: Mark A. DeWitt, Berkeley, CA (US); David I. Martin, Oakland, CA (US); Wendy Magis, Oakland, CA (US); Jacob E. Corn, Berkeley, CA (US); Mark C. Walters, Alamo, CA (US); Donald B. Kohn, Los Angeles, CA (US); Zulema Romero Garcia, Los Angeles, CA (US)

(21) Appl. No.: 17/047,025

(22) PCT Filed: Apr. 10, 2019
(86) PCT No.: PCT/US19/26806

§ 371 Date: Oct. 12, 2020

Related U.S. Application Data
(60) Provisional application No. 62/657,412, filed on Apr. 13, 2018.

(51) Int. Cl. C12N 15/113; C12N 9/22; C12N 15/10; C12N 5/0789

(52) U.S. Cl. CPC C12N 15/113; C12N 9/22; C12N 15/102; C12N 2510/00; C12N 2310/20; C12N 2310/346; C12N 2310/3181; C12N 5/0647

(57) ABSTRACT

The present disclosure provides a method of modifying a globin gene in the genome of a hematopoietic stem/progenitor cell (HSPC), the method comprising: A) obtaining HSPCs from an individual having a globin gene comprising a sickle cell disease (SCD)-associated single nucleotide polymorphism (SNP) to generate an in vitro population of CD34+ HSPCs and B) contacting the in vitro population with a genome editing composition, as described in further detail below. Also provided is a method of treating sickle cell disease (SCD) in an individual including administering to an individual an in vitro mixed population derived from the method of modifying a globin gene, as well as kits for practicing the same.

### CROSS-REFERENCE

[0001] This application claims the benefit of U.S. Provisional Patent Application No. 62/657,412, filed Apr. 13, 2018, which application is incorporated herein by reference in its entirety.

### INCORPORATION BY REFERENCE OF SEQUENCE LISTING PROVIDED AS A TEXT FILE

[0002] A Sequence Listing is provided herewith as a text file, “BERK-381PRV_SeqList_ST25.txt” created on Mar. 28, 2018 and having a size of 7,955 KB. The contents of the text file are incorporated by reference herein in their entirety.

### INTRODUCTION

[0003] Sickle cell disease is an inherited recessive disease, caused by a single nucleotide polymorphism in β-globin (HBB). The modified hemoglobin causes normally round red blood cells to take on a sticky, sickle-shaped form. Sickle red blood cells clog blood vessels, causing acute pain “crises” and vasculopathy. Additional complications and consequences associated with sickle cell disease include organ damage, organ failure, increased risk of stroke, pulmonary hypertension, acute chest syndrome (ACS), and decreased lifespan. There is no widely available cure for sickle cell disease. Treatments include allogeneic bone marrow transplants, which can be risky and limited by donor availability.

### SUMMARY

[0004] The present disclosure provides a method of modifying a globin gene in the genome of a hematopoietic stem/progenitor cell (HSPC), the method comprising: A) obtaining HSPCs from an individual having a globin gene comprising a sickle cell disease (SCD)-associated single-nucleotide polymorphism (SNP) to generate an in vitro population of CD34⁺ HSPCs and B) contacting the in vitro population with a genome editing composition, as described in further detail below. Also provided is a method of treating sickle cell disease (SCD) in an individual including administering to an individual an in vitro mixed population derived from the method of modifying a globin gene, as well as kits for practicing the same.

### BRIEF DESCRIPTION OF THE DRAWINGS

[0005] FIG. 1 depicts the co-delivery by electroporation of a Cas9 ribonucleoprotein (RNP) complex and a single-stranded DNA oligonucleotide donor (ssODN) to harvested hematopoietic stem cells (HSCs). A Cas9 RNP is combined with an ssODN to modify the ß-globin gene in HSCs, via electroporation. Purified Cas9 is mixed with purified RNA bearing 3×MS protection. The RNP is mixed with ssODN and HSCs, and the reagents are delivered inside the cells by electroporation. After culture, the cells are analyzed for editing using a next-generation sequencing assay, CFU assay for HSPC multipotent potential, and engraftment in an NBSGW mouse model of engraftment. Edits are maintained in mice, and the edited cells appear healthy and capable of efficient re-population.

[0006] FIG. 2 depicts a single-stranded DNA homology directed repair (HDR) donor. The ssDNA HDR donor asymmetrically designed around the cut site in a globin gene can be co-delivered with a Cas9 RNP loaded with a guide RNA by electroporation. (ssDNA Donor: SEQ ID NO: 1123; portion of globin gene with cut site: SEQ ID NO:1124).

[0007] FIG. 3 depicts the increase in HbA and HbF in edited SCD CD34⁺ HSPCs compared to non-edited SCD HSPCs.

[0008] FIG. 4 depicts the optimization of editing conditions. ER100, DO100, EO100, and CA137 refer to electroporation pulse settings in a Lonza 4D electroporator. 1×MSP refers to the chemical protection of a single guide RNA comprising 2′ O-methyl, thioPACE protection of the terminal 3′ and 5′ nucleotides. 3×MS refers to 2′ O-methyl, phosphoorothioate protection of the three 3′ and three 5′ nucleotides.

[0009] FIG. 5 depicts the titration of the RNP complex and an ssDNA donor template for analyzing editing outcomes (NHEJ, HDR) by next-generation sequencing in CD34⁺ HSPCs.

[0010] FIG. 6A-6F provides amino acid sequences of Streptococcus pyogenes Cas9 (FIG. 6A) and variants of Streptococcus pyogenes Cas9 (FIG. 6B-6F).

[0011] FIG. 7 provides an amino acid sequence of Staphylococcus aureus Cas9.

[0012] FIG. 8A-8C provide amino acid sequences of Francisella tularensis Cpf1 (FIG. 8A), Acidaminococcus sp. BV3L6 Cpf1 (FIG. 8B), and a variant Cpf1 (FIG. 8C).

[0013] FIG. 9 depicts the percent of viable unedited and edited SCD HSPCs that were mobilized by plerixafor, as well as the percent of corrected SCD alleles in HSPCs mobilized by plerixaflor. 10⁸ HSPCs were collected after mobilization by plerixafor.

[0014] FIG. 10 shows in vitro phenotyping of HSPCs by HPLC. FIG. 10 depicts a chromatogram obtained from edited Plerixafor-mobilized SCD CD34⁺ HSPCs after correction with an ssDNA donor. The HSPCs included 22% HbS, 40% HbA, 37% HbF, and 78% non-sickle hemoglobin.

[0015] FIG. 11 shows in vitro phenotyping by RNAseq. The analyzed sample included >50% non-sickle HBB.

[0016] FIG. 12 depicts a schematic of the protocol for in vitro editing of SCD-associated SNPs in HSPCs and injection of the edited HSPCs into mice.

[0017] FIG. 13 depicts the percent of corrected SCD alleles after four months of engraftment in NBSGW mice. After engraftment, analysis showed >90% elimination of the SCD allele as well as an average correction of 22% in marrow and 20% in progenitors in marrow. The engraftment average was 45%.

[0018] FIG. 14 depicts cutting of on- and off-target sites by high—fidelity Cas9 variants, as well as viability of the high-fidelity Cas9 variants after electroporation. IDT mutant 1 reduced off-target cutting by 20 times.

[0019] FIG. 15 depicts a genomic region of the human beta-globin gene and the location of the SCD-associated SNP. The SCD-associated SNP (A to T mutation) is located at position 170 (bold). The PAM sequence (positions 182-184; underline and bold) and G10 guide RNA binding site (positions 185-204; underline) are also depicted.

[0020] FIG. 16 depicts the sequence of ssDNA donor CJ6A. The ssDNA donor CJ6A may be used to correct the SCD-associated SNP to the wild-type SNP.

[0021] FIG. 17 depicts the sequence of an embodiment of a guide RNA (G10) and a guide RNA targeting segment. “*” denotes 2′O-methyl phosphorothioate protection.

[0022] FIG. 18 depicts clinical-scale electroporation of harvested CD34⁺ HSPCs with RNP/ss donor DNA template. Following electroporation, the cells are frozen, then thawed prior to use.

### DEFINITIONS

[0023] The terms “polynucleotide” and “nucleic acid,” used interchangeably herein, refer to a polymeric form of nucleotides of any length, either ribonucleotides or deoxyribonucleotides. Thus, terms “polynucleotide” and “nucleic acid” encompass single-stranded DNA; double-stranded DNA; multi-stranded DNA; single-stranded RNA; double-stranded RNA; multi-stranded RNA; genomic DNA; cDNA; DNA-RNA hybrids; and a polymer comprising purine and pyrimidine bases or other natural, chemically or biochemically modified, non-natural, or derivatized nucleotide bases.

[0024] By “hybridizable” or “complementary” or “substantially complementary” it is meant that a nucleic acid (e.g. RNA, DNA) comprises a sequence of nucleotides that enables it to non-covalently bind, i.e. form Watson-Crick base pairs and/or G/U base pairs, “anneal”, or “hybridize,” to another nucleic acid in a sequence-specific, antiparallel, manner (i.e., a nucleic acid specifically binds to a complementary nucleic acid) under the appropriate in vitro and/or in vivo conditions of temperature and solution ionic strength. Standard Watson-Crick base-pairing includes: adenine (A) pairing with thymidine (T), adenine (A) pairing with uracil (U), and guanine (G) pairing with cytosine (C) [DNA, RNA]. In addition, for hybridization between two RNA molecules (e.g., dsRNA), and for hybridization of a DNA molecule with an RNA molecule (e.g., when a ssRNA target nucleic acid base pairs with a DNA PAM-containing oligonucleotide (also referred to herein as a “PAMmer”), when a DNA target nucleic acid base pairs with a guide RNA, etc.): guanine (G) can also base pair with uracil (U). For example, G/U base-pairing is partially responsible for the degeneracy (i.e., redundancy) of the genetic code in the context of tRNA anti-codon base-pairing with codons in mRNA. Thus, in the context of this disclosure, a guanine (G) (e.g., of a protein-binding segment (dsRNA duplex) of a guide RNA molecule; of a target nucleic acid base pairing with a guide RNA and/or a PAM-containing oligonucleotide, etc.) is considered complementary to both a uracil (U) and to an adenine (A). For example, when a G/U base-pair can be made at a given nucleotide position of a protein-binding segment (e.g., dsRNA duplex) of a guide RNA molecule, the position is not considered to be non-complementary, but is instead considered to be complementary.

[0025] Hybridization and washing conditions are well known and exemplified in Sambrook, J., Fritsch, E. F. and Maniatis, T. Molecular Cloning: A Laboratory Manual, Second Edition, Cold Spring Harbor Laboratory Press, Cold Spring Harbor (1989), particularly Chapter 11 and Table 11.1 therein; and Sambrook, J. and Russell, W., Molecular Cloning: A Laboratory Manual, Third Edition, Cold Spring Harbor Laboratory Press, Cold Spring Harbor (2001). The conditions of temperature and ionic strength determine the “stringency” of the hybridization.

[0026] Hybridization requires that the two nucleic acids contain complementary sequences, although mismatches between bases are possible. The conditions appropriate for hybridization between two nucleic acids depend on the length of the nucleic acids and the degree of complementarity, variables well known in the art. The greater the degree of complementarity between two nucleotide sequences, the greater the value of the melting temperature (Tm) for hybrids of nucleic acids having those sequences. For hybridizations between nucleic acids with short stretches of complementarity (e.g. complementarity over 35 or fewer, 30 or fewer, 25 or fewer, 22 or fewer, 20 or fewer, or 18 or fewer nucleotides) the position of mismatches can become important (see Sambrook et al., supra, 11.7-11.8). Typically, the length for a hybridizable nucleic acid is 8 nucleotides or more (e.g., 10 nucleotides or more, 12 nucleotides or more, 15 nucleotides or more, 20 nucleotides or more, 22 nucleotides or more, 25 nucleotides or more, or 30 nucleotides or more). The temperature and wash solution salt concentration may be adjusted as necessary according to factors such as length of the region of complementation and the degree of complementation.

[0027] It is understood that the sequence of a polynucleotide need not be 100% complementary to that of its target nucleic acid to be specifically hybridizable or hybridizable. Moreover, a polynucleotide may hybridize over one or more segments such that intervening or adjacent segments are not involved in the hybridization event (e.g., a loop structure or hairpin structure). A polynucleotide can comprise 60% or more, 65% or more, 70% or more, 75% or more, 80% or more, 85% or more, 90% or more, 95% or more, 98% or more, 99% or more, 99.5% or more, or 100% sequence complementarity to a target region within the target nucleic acid sequence to which it will hybridize. For example, an antisense nucleic acid in which 18 of 20 nucleotides of the antisense compound are complementary to a target region, and would therefore specifically hybridize, would represent 90 percent complementarity. In this example, the remaining noncomplementary nucleotides may be clustered or interspersed with complementary nucleotides and need not be contiguous to each other or to complementary nucleotides. Percent complementarity between particular stretches of nucleic acid sequences within nucleic acids can be determined using any convenient method. Exemplary methods include BLAST programs (basic local alignment search tools) and PowerBLAST programs (Altschul et al., J. Mol. Biol., 1990, 215, 403-410; Zhang and Madden, Genome Res., 1997, 7, 649-656) or by using the Gap program (Wisconsin Sequence Analysis Package, Version 8 for Unix, Genetics Computer Group, University Research Park, Madison Wis.), using default settings, which uses the algorithm of Smith and Waterman (Adv. Appl. Math., 1981, 2, 482-489).

[0028] A “target nucleic acid” or “target segment” as used herein is a polynucleotide (e.g., RNA, DNA) that includes a “target site” or “target sequence.” The terms “target site” or “target sequence” are used interchangeably herein to refer to a nucleic acid sequence present in a target nucleic acid to which a targeting segment of a guide RNA will bind, provided sufficient conditions for binding exist; and/or to which a region (segment) of a PAM-containing oligonucleotide (e.g., a specificity segment and/or an orientation segment) will bind. For example, the target site (or target sequence) 5′-GAGCAUAUC-3′ within a target nucleic acid is targeted by (or is bound by, or hybridizes with, or is complementary to) the sequence 5′-GAUAUGCUC-3′. Suitable hybridization conditions include physiological conditions normally present in a cell. For a double stranded target nucleic acid, the strand of the target nucleic acid that is complementary to and hybridizes with the guide RNA is referred to as the “complementary strand”; while the strand of the target nucleic acid that is complementary to the “complementary strand” (and is therefore not complementary to the guide RNA) is referred to as the “noncomplementary strand” or “non-complementary strand”. In cases where the target nucleic acid is a single stranded target nucleic acid (e.g., single stranded DNA (ssDNA), single stranded RNA (ssRNA)), the guide RNA is complementary to and hybridizes with single stranded target nucleic acid.

[0029] By “cleavage” it is meant the breakage of the covalent backbone of a target nucleic acid molecule (e.g., RNA, DNA). Cleavage can be initiated by a variety of methods including, but not limited to, enzymatic or chemical hydrolysis of a phosphodiester bond. Both single-stranded cleavage and double-stranded cleavage are possible, and double-stranded cleavage can occur as a result of two distinct single-stranded cleavage events. In certain embodiments, a complex comprising a guide RNA and a Class 2 CRISPR effector protein is used for targeted cleavage of a single stranded target nucleic acid (e.g., ssRNA, ssDNA).

[0030] “Nuclease” and “endonuclease” are used interchangeably herein to mean an enzyme which possesses catalytic activity for nucleic acid cleavage (e.g., ribonuclease activity (ribonucleic acid cleavage), deoxyribonuclease activity (deoxyribonucleic acid cleavage), etc.).

[0031] By “cleavage domain” or “active domain” or “nuclease domain” of a nuclease it is meant the polypeptide sequence or domain within the nuclease which possesses the catalytic activity for nucleic acid cleavage. A cleavage domain can be contained in a single polypeptide chain or cleavage activity can result from the association of two (or more) polypeptides. A single nuclease domain may consist of more than one isolated stretch of amino acids within a given polypeptide.

[0032] A nucleic acid molecule that binds to the Class 2 CRISPR effector protein and targets the protein to a specific location within the target nucleic acid is referred to herein as a “guide RNA”. A guide RNA comprises two segments, a first segment (referred to herein as a “targeting segment”); and a second segment (referred to herein as a “protein-binding segment”). By “segment” it is meant a segment/section/region of a molecule, e.g., a contiguous stretch of nucleotides in a nucleic acid molecule. A segment can also mean a region/section of a complex such that a segment may comprise regions of more than one molecule. For example, in some cases the guide RNA is one nucleic acid molecule (e.g., one RNA molecule) and the protein-binding segment therefore comprises a region of that one molecule. In other cases, the protein-binding segment (described below) of a guide RNA includes regions of two separate molecules that are hybridized along a region of complementarity (forming a dsRNA duplex). The definition of “segment,” unless otherwise specifically defined in a particular context, is not limited to a specific number of total base pairs, is not limited to any particular number of base pairs from a given nucleic acid molecule, is not limited to a particular number of separate molecules within a complex, and may include regions of nucleic acid molecules that are of any total length and may or may not include regions with complementarity to other molecules.

[0033] In some embodiments, a subject nucleic acid (e.g., a guide RNA, a nucleic acid comprising a nucleotide sequence encoding a guide RNA; a nucleic acid encoding a Class 2 CRIPSR effector protein; a PAM-containing oligonucleotide, etc.) comprises a modification or sequence (e.g., an additional segment at the 5′ and/or 3′ end) that provides for an additional desirable feature (e.g., modified or regulated stability; subcellular targeting; tracking, e.g., a fluorescent label; a binding site for a protein or protein complex; etc.). Non-limiting examples include: a 5′ cap (e.g., a 7-methylguanylate cap (m7G)); a 3′ polyadenylated tail (i.e., a 3′ poly(A) tail); a ribozyme sequence (e.g. to allow for self-cleavage and release of a mature molecule in a regulated fashion); a riboswitch sequence (e.g., to allow for regulated stability and/or regulated accessibility by proteins and/or protein complexes); a stability control sequence; a sequence that forms a dsRNA duplex (i.e., a hairpin)); a modification or sequence that targets the nucleic acid to a subcellular location (e.g., nucleus, mitochondria, chloroplasts, and the like); a modification or sequence that provides for tracking (e.g., direct conjugation to a fluorescent molecule, conjugation to a moiety that facilitates fluorescent detection, a sequence that allows for fluorescent detection, etc.); a modification or sequence that provides a binding site for proteins (e.g., proteins that act on DNA and/or RNA, including transcriptional activators, transcriptional repressors, DNA methyltransferases, DNA demethylases, histone acetyltransferases, histone deacetylases, and the like); and combinations thereof.

[0034] A guide RNA and a Class 2 CRISPR effector protein form a complex (i.e., bind via non-covalent interactions). The guide RNA provides target specificity to the complex by comprising a nucleotide sequence that is complementary to a sequence of a target nucleic acid. The protein of the complex provides the site-specific activity. In other words, the protein is guided to a target nucleic acid sequence (e.g. a target sequence in a chromosomal nucleic acid; a target sequence in an extrachromosomal nucleic acid, e.g. an episomal nucleic acid, a minicircle, an ssRNA, an ssDNA, etc.; a target sequence in a mitochondrial nucleic acid; a target sequence in a chloroplast nucleic acid; a target sequence in a plasmid; etc.) by virtue of its association with the protein-binding segment of the guide RNA.

[0035] In some embodiments, a guide RNA comprises two separate nucleic acid molecules: an “activator” and a “targeter” (see below) and is referred to herein as a “dual guide RNA”, a “double-molecule guide RNA”, a “dual guide RNA”, a “two-molecule guide RNA”, or simply “dgRNA.” In some embodiments, the guide RNA has an activator and a targeter (as are present in a dual guide RNA), where the activator and targeter are covalently linked to one another (e.g., via intervening nucleotides) and is referred to herein as a “single guide RNA”, a “single-molecule guide RNA,” or a “one-molecule guide RNA.” The term “guide RNA” is inclusive, referring to both dual guide RNAs (dgRNAs) and to single guide RNAs (sgRNAs). In some cases, a guide RNA is a DNA/RNA hybrid molecule.

[0036] As used herein, “globin gene” refers to a gene that encodes a polypeptide of a hemoglobin molecule. The globins are a superfamily of heme-containing globular proteins which are involved in binding and transporting oxygen. There are two main clusters of globin genes in humans: the alpha globin cluster on chromosome 16 and the beta globin cluster on chromosome 11. In humans, the normal hemoglobin molecule consists of four polypeptide chains, the α-, β-, δ- and γ-globin chains, which are encoded by the α-, β-, δ- and γ-globin genes, respectively. Further, in the human adult, there are three different hemoglobin types made up of different combinations of these globin chains: Hemoglobin A (HbA), Hemoglobin A2 (I-IhA2), and Hemoglobin F (HhF). Hemoglobin A (HbA), the predominant type of hemoglobin in adults is made of 2 α-chains and 2 β-chains.

[0037] As used herein, “sickle cell disease” (SCD) refers to a group of genetic disorders characterized by the predominance of hemoglobin S (HbS). These disorders include, for example, sickle cell anemia, the sickle beta thalassemia syndromes, and hemoglobinopathies in which HbS is in association with another abnormal hemoglobin. SCD is a severe hemoglobinopathy that produces multisystem complications due to the expression of abnormal sickle hemoglobin (HbS). The most common type of SCD is sickle cell anemia (SCA) (also referred to as HbSS or SS disease or hemoglobin S) in which there is homozygosity for the mutation that causes HbS. The more rare types of SCD in which there is heterozygosity (one copy of the mutation that causes HbS and one copy for another abnormal hemoglobin allele) for the mutation include sickle-hemoglobin C (HbSC), sickle β⁺ thalassemia (HbS/β⁺) and sickle) β⁰ thalassemia)(HbS/β⁰.

[0038] As used herein, “stem cell mobilization agent” refers to any agent that facilitates or enhances the mobilization of hematopoietic stem/progenitor cells (HSPCs), e.g., from the bone marrow (BM) to the peripheral blood (PB). The mobilized HSPCs may be preserved, frozen, and stored until the time of transplant or reinfusion. As used herein, the term “hematopoietic stem/progenitor cells” refers to a heterogeneous population of cells including hematopoietic progenitor cells and hematopoietic stem cells. It is also contemplated herein that hematopoietic stem cells and/or hematopoietic progenitor cells are isolated and expanded ex vivo prior to transplantation.

[0039] As used herein, the term “hematopoietic progenitor cells” encompasses pluripotent cells capable of differentiating into several cell types of the hematopoietic system, including, but not limited to, granulocytes, monocytes, erythrocytes, megakaryocytes, B-cells and T-cells. Hematopoietic progenitor cells are committed to the hematopoietic cell lineage and generally do not self-renew. The term “hematopoietic progenitor cells” encompasses short term hematopoietic stem cells (ST-HSCs), multi-potent progenitor cells (MPPs), common myeloid progenitor cells (CMPs), granulocyte-monocyte progenitor cells (GMPs), and megakaryocyte-erythrocyte progenitor cells (MEPs). The term “hematopoietic progenitor cells” does not encompass hematopoietic stem cells capable of self-renewal (herein referred to as “hematopoietic stem cells”). The presence of hematopoietic progenitor cells can be determined functionally as colony forming unit cells (CFU-Cs) in complete methylcellulose assays, or phenotypically through the detection of cell surface markers using assays known to those of skill in the art.

[0040] As used herein, the term “hematopoietic stem cell (HSC)” refers to a cell with multi-lineage hematopoietic differentiation potential and sustained self-renewal activity. “Self renewal” refers to the ability of a cell to divide and generate at least one daughter cell with the identical (e.g., self-renewing) characteristics of the parent cell. The second daughter cell may commit to a particular differentiation pathway. For example, a self-renewing hematopoietic stem cell divides and forms one daughter stem cell and another daughter cell committed to differentiation in the myeloid or lymphoid pathway. A committed progenitor cell has typically lost the self-renewal capacity, and upon cell division produces two daughter cells that display a more differentiated (i.e., restricted) phenotype. Hematopoietic stem cells have the ability to regenerate long term multi-lineage hematopoiesis (e.g., “long-term engraftment”) in individuals receiving a bone marrow or cord blood transplant. The hematopoietic stem cells used may be derived from any one or more of the following sources: fetal tissues, cord blood, bone marrow, peripheral blood, mobilized peripheral blood, a stem cell line, or may be derived ex vivo from other cells, such as embryonic stem cells, induced pluripotent stem cells (iPS cells) or adult pluripotent cells. The cells from the above listed sources may be expanded ex vivo using any method acceptable to those skilled in the art prior to use in the transplantation procedure. For example, cells may be sorted, fractionated, treated to remove malignant cells, or otherwise manipulated to treat the patient using any procedure acceptable to those skilled in the art of preparing cells for transplantation. If the cells used are derived from an immortalized stem cell line, further advantages would be realized in the ease of obtaining and preparation of cells in adequate quantities.

[0041] General methods in molecular and cellular biochemistry can be found in such standard textbooks as Molecular Cloning: A Laboratory Manual, 3rd Ed. (Sambrook et al., HaRBor Laboratory Press 2001); Short Protocols in Molecular Biology, 4th Ed. (Ausubel et al. eds., John Wiley & Sons 1999); Protein Methods (Bollag et al., John Wiley & Sons 1996); Nonviral Vectors for Gene Therapy (Wagner et al. eds., Academic Press 1999); Viral Vectors (Kaplift & Loewy eds., Academic Press 1995); Immunology Methods Manual (I. Lefkovits ed., Academic Press 1997); and Cell and Tissue Culture: Laboratory Procedures in Biotechnology (Doyle & Griffiths, John Wiley & Sons 1998), the disclosures of which are incorporated herein by reference.

[0042] Before the present invention is further described, it is to be understood that this invention is not limited to particular embodiments described, as such may, of course, vary. It is also to be understood that the terminology used herein is for the purpose of describing particular embodiments only, and is not intended to be limiting, since the scope of the present invention will be limited only by the appended claims.

[0043] Where a range of values is provided, it is understood that each intervening value, to the tenth of the unit of the lower limit unless the context clearly dictates otherwise, between the upper and lower limit of that range and any other stated or intervening value in that stated range, is encompassed within the invention. The upper and lower limits of these smaller ranges may independently be included in the smaller ranges, and are also encompassed within the invention, subject to any specifically excluded limit in the stated range. Where the stated range includes one or both of the limits, ranges excluding either or both of those included limits are also included in the invention.

[0044] Unless defined otherwise, all technical and scientific terms used herein have the same meaning as commonly understood by one of ordinary skill in the art to which this invention belongs. Although any methods and materials similar or equivalent to those described herein can also be used in the practice or testing of the present invention, the preferred methods and materials are now described. All publications mentioned herein are incorporated herein by reference to disclose and describe the methods and/or materials in connection with which the publications are cited.

[0045] It must be noted that as used herein and in the appended claims, the singular forms “a,” “an,” and “the” include plural referents unless the context clearly dictates otherwise. Thus, for example, reference to “a hematopoietic stem cell” includes a plurality of such hematopoietic stem cells and reference to “the class 2 CRISPR/Cas effector polypeptide” includes reference to one or more class 2 CRISPR/Cas effector polypeptides and equivalents thereof known to those skilled in the art, and so forth. It is further noted that the claims may be drafted to exclude any optional element. As such, this statement is intended to serve as antecedent basis for use of such exclusive terminology as “solely,” “only” and the like in connection with the recitation of claim elements, or use of a “negative” limitation.

[0046] It is appreciated that certain features of the invention, which are, for clarity, described in the context of separate embodiments, may also be provided in combination in a single embodiment. Conversely, various features of the invention, which are, for brevity, described in the context of a single embodiment, may also be provided separately or in any suitable sub-combination. All combinations of the embodiments pertaining to the invention are specifically embraced by the present invention and are disclosed herein just as if each and every combination was individually and explicitly disclosed. In addition, all sub-combinations of the various embodiments and elements thereof are also specifically embraced by the present invention and are disclosed herein just as if each and every such sub-combination was individually and explicitly disclosed herein.

[0047] The publications discussed herein are provided solely for their disclosure prior to the filing date of the present application. Nothing herein is to be construed as an admission that the present invention is not entitled to antedate such publication by virtue of prior invention. Further, the dates of publication provided may be different from the actual publication dates which may need to be independently confirmed.

### DETAILED DESCRIPTION

[0048] The present disclosure provides a method of modifying a globin gene in the genome of a hematopoietic stem/progenitor cell (HSPC), the method comprising: A) obtaining HSPCs from an individual having a globin gene comprising a sickle cell disease (SCD)-associated single-nucleotide polymorphism (SNP) to generate an in vitro population of CD34⁺ HSPCs and B) contacting the in vitro population with a genome editing composition, as described in further detail below. Also provided is a method of treating sickle cell disease (SCD) in an individual including administering to an individual an in vitro mixed population derived from the method of modifying a globin gene, as well as kits for practicing the same.

### Methods of Modifying a Globin Gene

[0049] The present disclosure provides a method of modifying a globin gene in the genome of a hematopoietic stem/progenitor cell (HSPC). The method may include the steps of: A) obtaining HSPCs from an individual having a globin gene comprising a sickle cell disease (SCD)-associated single-nucleotide polymorphism (SNP), wherein said obtaining comprises: a) administering to the individual an amount of a stem cell mobilization agent effective to mobilize CD34⁺ HSPCs; and b) collecting the mobilized CD34⁺ HSPCs from the individual, thereby generating an in vitro population of CD34⁺ HSPCs; B) contacting the in vitro population of CD34⁺ HSPCs with a genome editing composition comprising: a) a ribonucleoprotein (RNP) complex comprising: i) a class 2 CRISPR/Cas effector polypeptide, or a nucleic acid comprising a nucleotide sequence encoding the class 2 CRISPR/Cas effector polypeptide; and ii) a guide RNA; and b) a donor DNA template comprising a nucleotide sequence that provides for correction of the SCD-associated SNP in the globin gene, thereby generating an in vitro mixed population, wherein at least 2% %, e.g., at least 5%, at least 10%, at least 15%, at least 20%, at least 25%, at least 30%, at least 35%, at least 40%, at least 45%, at least 50%, or more than 50%, of the SCD-associated SNPs have been corrected in the in vitro mixed population. As used herein, the terms “corrected” and “edited” may be used interchangeably. As used herein, the terms “globin gene” may be used interchangeably with “globin allele.” In some cases, a globin allele comprises a sickle cell mutation, referred to herein as “a sickle cell allele” or “SCD allele.” A “corrected SCD allele” may refer to a β-globin allele in which an SCD-associated SNP has been corrected, such that the SCD-associated SNP is no longer present in the allele; i.e., such that the allele encodes a β-globlin that does not include a SCD mutation. A “corrected SCD-associated SNP” may be used interchangeably with “a corrected β-globin allele.” A globin allele comprising a corrected SCD allele may refer to a globin allele comprising a corrected SCD-associated SNP or a globin allele having no SCD-associated SNPs.

[0050] Aspects of the methods include obtaining HSPCs from an individual having a globin gene comprising a SCD-associated SNP. Various SCD-associated SNPs may be suitable for editing in the subject methods. In some cases, the SCD-associated SNP is an A-to-T substitution at position 170 of the nucleotide sequence depicted in FIG. 15. In some cases, the HSPCs are obtained from an individual who is homozygous for a SCD-associated SNP. In some cases, the HSPCs are obtained form an individual who is heterozygous for a SCD-associated SNP.

[0051] Aspects of the methods include administering an amount of stem cell mobilization agent. The stem cell mobilization agent may be used to obtain a sample of CD34⁺ HSPCs from an individual. In some cases, the stem cell mobilization agent is a small molecule. In some instances, the stem cell mobilization agent is a cytokine. Suitable stem cell mobilization agents include, but are not limited to, AMD3465, NIBR 1816, TG-0054, G-CSF, GM-CSF, SDF-1, and SCF. In some cases, the stem cell mobilization agent is plerixafor, as described in detail in U.S. Pat. No. 7,897,590; U.S. Pat. No. RE42,152; and U.S. Pat. No. 6,987,102. Plerixafor is a macrocyclic compound and a hicvclam derivative having the structure:

[chemical structure]

### Structure 1

### 1,4-Bis 1,4,8,11-tetraazacyclotetradecan-1-yl)methyl)benzene

[0052] An effective amount of the stem cell mobilization agent can vary and may depend on the stem cell mobilization agent. In some cases, an effective amount is the amount effective to mobilize from about 10⁵ CD34⁺ HSPCs to about 10⁸ CD34⁺ HSPCs. Where the stem cell mobilization agent is plerixafor, an effective amount to mobilize the requisite amount of CD34⁺ HSPCs can range from about 200 μg to about 300 μg (e.g., from about 200 μg to about 220 μg, from about 220 μg to about 240 μg, from about 240 μg to about 250 μg, or from about 250 to about 300 μg. In some cases, 240 μg plerixafor is administered to an individual by a subcutaneous injection 5-10 hours before HSPC harvesting by aphersis. Subjects can also undergo an RBC exchange transfusion completed before the harvesting apheresis) procedure, to reduce the circulating HbS fraction to 30% and thereby reduce the risk of a vaso-occlusive complication during the plerixafor mobilization and apheresis procedure. In some cases, the target yield for this procedure is 10×10⁶ CD34⁺ cells/kg recipient weight. In some cases, the aphersis procedure is performed for up to 2 consecutive days. In some cases, an effective amount is the amount effective to mobilize from about 10⁵ HSPCs to 10⁸ FISPCs, such as, e.g., from 10⁵ to 10⁶ HSPCs, from 10⁶ to 10⁷ HSPCs, from 10⁷ to 10⁸ HSPCs, or more than 10⁸ HSPCs. The mobilized stem cells may be collected, thereby generating an in vitro population of CD34⁺ HSPCs. The in vitro population of HSPCs can include from 10⁵ to 10⁸ cells such as, e.g., from 10⁵ to 10⁶ cells, from 10⁶ to 10⁷ cells, from 10⁷ to 10⁸ cells, or more than 10⁸ cells. The in vitro population of CD34⁺ HSPCs may be cultured for a period of time before the population is contacted with a genome editing composition, as described below. In some cases, the in vitro population of unedited HSPCs may be cultured for 1 hour (hr) to 80 hours (hrs) such as, e.g., for 1 hr to 72 hrs, for 1 hr to 48 hrs, for 1 hr to 24 hrs, for 1 hr to 10 hrs, for 1 hr to 5 hrs, or for 1 hr to 2 hrs. The culture media may include the following: growth factors, cytokines, adhesion mediators, minerals, among other factors. Additional culture parameters that may be suitable are described in Frisch, B. J., & Calvi, L. M. (2014). Hematopoietic Stem Cell Cultures and Assays. Methods in Molecular Biology (Clifton, N.J.), 1130, 315-324; Potter, H., & Heller, R. (2003). Transfection by Electroporation. Current Protocols in Molecular Biology/Edited by Frederick M. Ausubel et al., CHAPTER, Unit-9.3.

[0053] The in vitro population of CD34⁺ HSPCs may be isolated or purified from a sample by any known method. In certain embodiments, the HSPCs may be magnetically labeled and separated from a sample with use of a magnetic field generated by a magnetic field source, e.g., a permanent magnet or an electromagnet. The HSPCs may be labeled with magnetic particles such as, e.g., ferromagnetic, superparamagnetic or paramagnetic solid phases such as colloidal particles, microspheres, nanoparticles, or beads. The particles may be used in suspension or in a lyophilized state. In certain embodiments, the magnetically labeled cells are separated from a sample in a magnetic activated cell separation (MACS®) system. The technique of magnetic activated cell sorting can involve coupling a cell surface with magnetic particles the size of cellular macromolecules. The cells may be passed through a magnetizable matrix in a strong magnetic field. Labeled cells may stick to the matrix and can be separated form unlabeled cells, which flow through. The magnetic labeled cells can be eluted when the column is demagnetized by removal from the magnetic field. In some instances, the system includes a magnetic separator, i.e., an apparatus containing one or magnets, e.g., one or more permanent magnets, and configured to hold one or more magnetic separation columns. The separation columns for use with the magnetic separator include columns that may be filled with a paramagnetic material, e.g., iron spheres, to amplify the magnetic field of the magnetic separator. The magnetic field retains magnetically labeled cells that pass through the column placed in a separator. In some instances, the separator may be a MACS separator, e.g., CliniMACS® separator, MiniMACS™ separator, MidiMACS™ separator, etc. In some instances, the column may be a MACS column, e.g., MACS® MS column, MACS® LS Column, etc.

[0054] Aspects of the methods include contacting the in vitro population of CD34⁺ HSPCs with a genome editing composition. The number of HSPCs in the in vitro population for contacting with a gene editing composition may range from 10⁵ to 5×10⁹ cells such as, e.g., from 10⁵ to 10⁶ cells from 10⁶ to 10⁷ cells, from 10⁷ to 10⁸ cells, from 10⁸ cells to 5×10⁸ cells, from 5×10⁸ cells to 10⁹ cells, from 10⁹ cells to 2×10⁹ cells, or from 2×10⁹ cells to 5×10⁹ cells. The genome editing composition may include an RNP complex comprising a class 2 CRISPR/Cas effector polypeptide or a nucleic acid comprising a nucleotide sequence encoding the class 2 CRISPR/Cas effector polypeptide. The RNP complex may further comprise a guide RNA or a nucleic acid comprising a nucleotide sequence encoding the guide RNA. The genome editing composition may further include a donor DNA template (e.g., a single-stranded donor DNA template, as described below) comprising a nucleotide sequence that provides for correction of the SCD-associated SNP in the globin gene. The contacting may include combining, incubating, or mixing the genome editing composition with the in vitro population of CD34⁺ HSPCs. In some cases, the genome editing composition may be introduced into a cell, e.g., an HSPC. The genome editing composition may be introduced into a cell by any known method in the art such as, e.g., electroporation. A Class 2 CRISPR effector protein or nucleic acid encoding the Class 2 CRISPR effector protein may be introduced inside a cell. A guide RNA or nucleic acid encoding the guide RNA may be introduced into a cell. In some cases, the guide RNA has the nucleotide targeting segment 5′-CUUGCCCCACAGGGCAGUAA-3′ (SEQ ID NO: 1128). A donor DNA template may be introduced into a cell. The donor DNA template is in some cases single-stranded DNA. In some cases, the donor DNA template includes the nucleotide sequence

(SEQ ID NO: 1126)
5′-tcagggcagagccatctattgcttacaTTTGCTTCTGACACAACTGTG
TTCACTAGCAACCTCAAACAGACACCATGGTGCACCTGACTCCTgaaGAGA
AGTCTGCGGTTACTGCCCTGTGGGGCAAGGTGAACGTGGATGAAGTTGGTG
GTGAGGCCCTGGGCAGGT-3′.

[0055] The in vitro HSPC population may be contacted with any suitable amounts of the genome editing composition or components of the genome editing composition. In some cases, the amount of the RNP complex ranges from 10 pmol to 150 pmol per 10⁵ cells such as, e.g., from 50 pmol to 125 pmol, from 55 pmol to 120 pmol, from 60 pmol to 115 pmol, from 65 pmol to 110 pmol, from 70 pmol to 100 pmol, or from 75 pmol to 90 pmol per 10⁵ cells. In some cases, the amount of the ssDNA donor template ranges from 10 pmol to 150 pmol per 10⁵ cells such as, e.g., from 60 pmol to 140 pmol, from 70 pmol to 130 pmol, from 80 pmol to 120 pmol, from 90 pmol to 110 pmol, or 100 pmol to 105 pmol per 10⁵ cells. In some cases, e.g., for electroporation, the RNP complex, the ssDNA donor template, and the in vitro HSPCs are in a volume of from 1 μL to 30 μL; for example, the volume can range from 1 μL to 25 μL, from 5 μL to 20 μL, or from 10 μL to 20 μL. Volumes for clinical-scale gene-editing range from about 1 mL to about 100 mL (e.g., from about 1 mL to about 2 mL, from about 2 mL to about 5 mL, from about 5 mL to about 10 mL, from about 10 mL to about 25 mL, from about 25 mL to about 50 mL, from about 60 mL to about 75 mL, or from about 75 mL to about 100 mL). For example, a gene-editing composition suitable for use in a clinical setting with from about 10⁸ cells to about 10⁹ cells comprises e.g., from about 2 μM to about 5 μM ssDNA donor, from about 2 μM to about 5 μM Cas9, and from about 2 μM to about 5 μM RNA in from 1 mL to about 100 mL (e.g., from about 1 mL to about 2 mL, from about 2 mL to about 5 mL, from about 5 mL to about 10 mL, from about 10 mL to about 25 mL, from about 25 mL to about 50 mL, from about 60 mL to about 75 mL, or from about 75 mL to about 100 mL) of solution.

[0056] The contacting may occur under conditions suitable for a reaction to occur, e.g., for enzymatic cleavage to occur, for correction of the SCD-associated SNP to occur, for generation of the in vitro mixed population to occur. In some cases, the contacting occurs after culturing the in vitro population of unedited HSPCs. In some cases, the contacting to produce an in vitro mixed population occurs for a period of time that is less than 1 hour; for example, the contacting may occur for a period of time that is less than 45 min, less than 30 min, less than 20 min, less than 10 min, less than 5 min, or less than 1 min. In some instances, the contacting occurs at room temperature. A variety of other reagents may be included in the generation of the in vitro mixed population. These include reagents such as nuclease inhibitors, protease inhibitors, solubilizing agents, and the like. Reagents that improve the efficiency of the production of the in vitro mixed population include, but are not limited to, salts, peptides that bind Cas9, peptides that bind the pile RNA, nucleic acids that bind Cas9, nucleic acids that bind the guide RNA, small molecules that bind Cas9, or small molecules that bind the guide RNA, etc. The mixture of components can be added during an assay in any order that provides for the in vitro mixed population. In some cases, the in vitro population of unedited HSPCs is contacted with a gene editing composition and subjected to electroporation. In some cases, a mixture for use in electroporation, i.e., “an electroporation mixture,” includes any suitable electroporation buffer, Cas9 buffer (150 mM KCl, 50 mM HEPES pH 7.5, 10-50% glyercol), and gene editing components (e.g., Cas9 protein, a guide RNA, and an ssDNA HDR donor). In some cases, the volume of the electroporation mixture ranges from 20 μL to 100 μL; for example, the volume of the electroporation mixture can range from 20 μL to 50 μL, from 50 μL to 75 μL, or from 75 μL to 100 μL. In some cases, the volume of the electroporation mixture ranges from 1 mL to about 100 mL (e.g., from about 1 mL to about 2 mL, from about 2 mL to about 5 mL, from about 5 mL to about 10 mL, from about 10 mL to about 25 mL, from about 25 mL to about 50 mL, from about 60 mL to about 75 mL, or from about 75 mL to about 100 mL). Electroporation protocols for introducing gene editing components in cells are well known in the art. See, e.g., Potter, H., & Heller, R. (2003). Transfection by Electroporation. Current Protocols in Molecular Biology/Edited by Frederick M. Ausubel . . . [et al.], CHAPTER, Unit-9.3; and Jacobi, A. M., Rettig, G. R., Turk, R., Collingwood, M. A., Zeiner, S. A., Quadros, R. M., . . . Behlke, M. A. (2017). Simplified CRISPR tools for efficient genome editing and streamlined protocols for their delivery into mammalian cells and mouse zygotes. Methods, 121-122, 16-28. doi:10.1016/j.ymeth.2017.03.021.

[0057] After electroporation has occurred, the in vitro mixed HSPC population may be cultured in vitro for a period of time. The in vitro mixed HSPC population may be cultured for a period of time ranging from 0 days to 7 days such as, e.g., from 0 days to 6 days, from 0 days to 5 days, from 0 days to 4 days, from 0 days to 3 days, from 0 hours (hr) to 48 hrs, from 0 hr to 24 hrs, from 0 hr to 10 hrs, from 0 hr to 5 hrs, or from 0 hr to 2 hrs. The in vitro mixed HSPC population may be cultured in the presence of any suitable factors to promote the growth and expansion of the in vitro mixed population, e.g., HSPCs in the in vitro mixed population, including, but not limited to, the following: growth factors, adhesion mediators, minerals, cytokines (e.g., stem cell factor (SCF), Flt-3 ligand, thrombopoietin (TPO)), IL-3, IL-6, G-CSF, and animal-free stem cell culture media (e.g., SFEM II from StemCell Technologies; X-VIVO™ 15 (chemically defined, serum-free hematopoietic cell culture medium) from Lonza; and the like) among other factors. Additional culture parameters that may be suitable are described in Frisch, B. J., & Calvi, L. M. (2014). Hematopoietic Stem Cell Cultures and Assays. Methods in Molecular Biology (Clifton, N.J.), 1130, 315-324; Potter, H., & Heller, R. (2003). Transfection by Electroporation. Current Protocols in Molecular Biology/Edited by Frederick M. Ausubel . . . [et Al.], CHAPTER, Unit-9.3; and Jacobi, A. M., Rettig, G. R., Turk, R., Collingwood, M. A., Zeiner, S. A., Quadros, R. M., . . . Behlke, M. A. (2017). Simplified CRISPR tools for efficient genome editing and streamlined protocols for their delivery into mammalian cells and mouse zygotes. Methods, 121-122, 16-28. doi:10.1016/j.ymeth.2017.03.021.

[0058] The contacting may generate an in vitro mixed population. As used herein, the term “in vitro mixed population” refers to an in vitro population of genome editing composition-contacted CD34⁺ HSPCs. The term “in vitro mixed population” may be used interchangeably with “in vitro mixed HSPC population.” The cells of the in vitro mixed population may include viable HSCs capable of engraftment and long-term self-renewal. The in vitro mixed population may include three populations of cells: 1) a population of cells that have two non-corrected β-globin alleles with SCD-associated SNPs; 2) a population of cells that have only one β-globin allele with an SCD-associated SNP that has been corrected; and 3) a population of cells that have two β-globin alleles with SCD-associated SNPs that have been corrected. In some cases, the population of cells having two non-corrected β-globin alleles includes cells where one or more β-globin alleles have been knocked out. The knockout of one or more β-globin alleles may be due to non-homologous end joining (NHEJ) where small insertions or deletions (indels) are inserted at the site of cleavage, where the indels cause functional disruption through introduction of non-specific mutations at the cleavage location. The in vitro mixed population of cells may include the following percentages of the three populations of cells as described above: (90% of the total cells have two non-corrected β-globin alleles, 5% of the total cells have one corrected allele, 5% of the total cells have two corrected alleles); (80% of the total cells have two non-corrected β-globin alleles, 10% of the total cells have one corrected allele, 10% of the total cells have two corrected alleles); (70% of the total cells have two non-corrected β-globin alleles, 15% of the total cells have one corrected allele, 15% of the total cells have two corrected alleles); (60% of the total cells have two non-corrected β-globin alleles, 20% of the total cells have one corrected allele, 20% of the total cells have two corrected alleles); (50% of the total cells have two non-corrected β-globin alleles, 25% of the total cells have one corrected allele, 25% of the total cells have two corrected alleles); (40% of the total cells have two non-corrected β-globin alleles, 30% of the total cells have one corrected allele, 30% of the total cells have two corrected alleles); (30% of the total cells have two non-corrected β-globin alleles, 35% of the total cells have one corrected allele, 35% of the total cells have two corrected alleles); (20% of the total cells have two non-corrected β-globin alleles, 40% of the total cells have one corrected allele, 40% of the total cells have two corrected alleles); (10% of the total cells have two non-corrected β-globin alleles, 45% of the total cells have one corrected allele, 45% of the total cells have two corrected alleles); (0% of the total cells have two non-corrected β-globin alleles, 50% of the total cells have one corrected allele, 50% of the total cells have two corrected alleles). In certain embodiments, 2% to 95% of cells of the in vitro mixed population comprise two non-corrected SCD-associated SNPs after a period of time such as, e.g., 2% to 90% of cells, 2% to 80% of cells, 2% to 70% of cells, 2% to 60% of cells, 2% to 50% of cells, 2% to 40% of cells, 2% to 30% of cells, or 2% to 20% of cells. In certain embodiments, 2% to 95% of cells of the in vitro mixed population comprise only one corrected SCD-associated SNP after a period of time such as, e.g., 2% to 90% of cells, 2% to 80% of cells, 2% to 70% of cells, 2% to 60% of cells, 2% to 50% of cells, 2% to 40% of cells, 2% to 30% of cells, or 2% to 20% of cells. In certain embodiments, 2% to 95% of cells of the in vitro mixed population comprise two corrected SCD-associated SNPs after a period of time such as, e.g., 2% to 90% of cells, 2% to 80% of cells, 2% to 70% of cells, 2% to 60% of cells, 2% to 50% of cells, 2% to 40% of cells, 2% to 30% of cells, or 2% to 20% of cells. In certain embodiments, 2% to 95% of cells from the in vitro mixed population comprise at least one corrected SCD-associated SNP after a period of time such as, e.g., 2% to 90% of cells, 2% to 80% of cells, 2% to 70% of cells, 2% to 60% of cells, 2% to 50% of cells, 2% to 40% of cells, 2% to 30% of cells, or 2% to 20% of cells. The period of time may be a period of time after contacting of the in vitro population with the genome editing composition and may range from 0 days to 7 days such as, e.g., from 0 days to 6 days, from 0 days to 5 days, from 0 days to 4 days, from 0 days to 3 days, from 0 hours (hr) to 48 hrs, from 0 hr to 24 hrs, from 0 hr to 10 hrs, from 0 hr to 5 hrs, or from 0 hr to 2 hrs. In some cases, the percentage of the β-globin alleles with SCD-associated SNPs that have been corrected in the in vitro mixed population is at least 2%; for example at least 2%, at least 5%, at least 10%, at least 15%, at least 20%, at least 25%, at least 30%, at least 35%, at least 40%, at least 45%, at least 50%, or more than 50% of the β-globin alleles with SCD-associated SNPs have been corrected. In some cases, at least 2% of the β-globin alleles with SCD-associated SNPs have been corrected; for example at least 2%, at least 5%, at least 10%, at least 15%, at least 20%, at least 25%, at least 30%, at least 35%, at least 40%, at least 45%, at least 50%, or more than 50%, of the β-globin alleles in the in vitro mixed population have a corrected SCD-associated SNP. In some cases, 2% to 60% of the SCD-associated SNPs in the in vitro mixed population have been corrected; for example, 2% to 50%, 2% to 40%, 2% to 30%, 2% to 25%, 2% to 20%, or 2% to 10% of the SCD-associated SNPs in the in vitro mixed population have been corrected. In some cases, 50% of the SCD-associated SNPs in the in vitro mixed population have been corrected; for example, 45% of the SCD-associated SNPs, 35% of the SCD-associated SNPs, 25% of the SCD-associated SNPs, or 15% of the SCD-associated SNPS in the in vitro mixed population have been corrected. In some cases, the in vitro mixed population includes a population of HSCs with at least one β-globin allele with an SCD-associated SNP that has been corrected. A β-globin allele with a “corrected SCD-associated SNP” encodes a polypeptide subunit for forming HbA (and not HbS). The in vitro mixed population may be cultured for a period of time before the population is administered to an individual, as described below. In some cases, the in vitro mixed HSPC population (comprising edited HSPCs) may be cultured for 0 days to 7 days such as, e.g., from 0 days to 6 days, from 0 days to 5 days, from 0 days to 4 days, from 0 days to 3 days, from 0 hours (hr) to 48 hrs, from 0 hr to 24 hrs, from 0 hr to 10 hrs, from 0 hr to 5 hrs, or from 0 hr to 2 hrs. The culture medium may include any suitable factors to promote the growth and expansion of HSPCs, as described above.

[0059] In some cases, the in vitro mixed population includes a population of HSCs having at least one corrected SCD-associated SNP that remains corrected for a period of time after contacting the in vitro mixed population with the genome editing composition. The period of time may be for at least one month following said contacting, for at least 6 months following said contacting, for at least 1 year following said contacting, or for at least 2 years following said contacting. The at least one corrected SCD-associated SNP may remain permanently corrected after said contacting. In some cases, 2% to 20% of HSCs in the in vitro mixed population comprise at least one corrected SCD-associated SNP that remains corrected for a period of time; for example, 2% to 25% of HSCs, 2% to 30% of HSCs, 2% to 35% of HSCs, 2% to 40% of HSCs, 2% to 45% of HSCs, 2% to 50%, or 50% or more of HSCs in the in vitro population comprise at least one corrected SCD-associated SNP that remains corrected for a period of time after said administering.

[0060] Aspects of the methods further include cryopreserving the in vitro mixed population after the contacting with the genome editing composition has occurred, e.g., after genome editing has occurred, after correction of the SCD-associated SNP has occurred, etc. In some cases, the in vitro mixed population may be cryopreserved from 0 hr to 30 hr after the contacting has occurred; for example, the in vitro mixed population may be cryopreserved from 0 hr to 24 hr, from 0 hr to 12 hr, or from 0 hr to 6 hr after the contacting has occurred. Any known method used to successfully cryopreserve. HSPCs may be applied. The in vitro mixed population may be preserved in any standard cryopreservation solution. Accordingly, using cryopreservation, the stem cells can be maintained such that once it is determined that a subject or individual is in need of stem cell transplantation, the stem cells can be thawed and transplanted back into the subject. The use of one or more. HSPC modulators, for example PGE2, during cryopreservation techniques may enhance the HSPC population.

[0061] In some cases, the cryopreserved cells are thawed just prior to administration to an individual in need thereof (e.g., an individual having SCD). For example, in some cases, the cryopreserved in vitro mixed population is thawed from 5 minutes to 4 hours (e.g., from 5 minutes to 10 minutes, from 10 minutes to 30 minutes, from 30 minutes to 60 minutes, from 1 hour to 2 hours, or from 2 hours to 4 hours) prior to administration to an individual in need thereof (e.g., all individual having SCD).

### CRISPR Enzymes

[0062] A CRISPR enzyme suitable for inclusion in the methods of the present disclosure includes an RNA-guided endonuclease, also referred to herein as a “genome-editing nuclease.” The CRISPR enzyme may be a Class 2 CRISPR effector protein, also referred to herein as a class 2 CRISPR/Cas effector polypeptide.

[0063] Examples of RNA-guided endonucleases are CRISPR/Cas endonucleases (e.g., class 2 CRISPR/Cas endonucleases such as a type II, type V, or type VI CRISPR/Cas endonucleases). A suitable genome editing nuclease is a CRISPR/Cas endonuclease (e.g., a class 2 CRISPR/Cas endonuclease such as a type II, type V, or type VI CRISPR/Cas endonuclease). In some cases, a suitable RNA-guided endonuclease is a class 2 CRISPR/Cas endonuclease. In some cases, a suitable RNA-guided endonuclease is a class 2 type II CRISPR/Cas endonuclease (e.g., a Cas9 protein). In some cases, a genome targeting composition includes a class 2 type V CRISPR/Cas endonuclease (e.g., a Cpf1 protein, a C2c1 protein, or a C2c3 protein). In some cases, a suitable RNA-guided endonuclease is a class 2 type VI CRISPR/Cas endonuclease (e.g., a C2c2 protein; also referred to as a “Cas13a” protein). Also suitable for use is a CasX protein. Also suitable for use is a CasY protein.

[0064] In some cases, the genome-editing endonuclease is a CasX or a CasY polypeptide. CasX and CasY polypeptides are described in Burstein et al. (2017) Nature 542:237.

[0065] In some cases, the genome-editing endonuclease is a Type II CRISPR/Cas endonuclease. In some cases, the genome-editing endonuclease is a Cas9 polypeptide, also referred to herein as a “Cas9 enzyme.” The Cas9 protein is guided to a target site (e.g., stabilized at a target site) within a target nucleic acid sequence (e.g., a chromosomal sequence or an extrachromosomal sequence, e.g., an episomal sequence, a minicircle sequence, a mitochondrial sequence, a chloroplast sequence, etc.) by virtue of its association with the protein-binding segment of the Cas9 guide RNA. In some cases, a Cas9 polypeptide comprises an amino acid sequence having at least 50%, at least 60%, at least 70%, at least 80%, at least 90%, at least 95%, at least 98%, at least 99%, or more than 99%, amino acid sequence identity to the Streptococcus pyogenes Cas9 depicted in FIG. 6A. In some cases, a Cas9 polypeptide comprises the amino acid sequence depicted in one of FIG. 6A-6F.

[0066] In some cases, the Cas9 polypeptide used in a composition or method of the present disclosure is a Staphylococcus aureus Cas9 (saCas9) polypeptide. In some cases, the saCas9 polypeptide comprises an amino acid sequence having at least 85%, at least 90%, at least 95%, at least 98%, at least 99%, or 100%, amino acid sequence identity to the saCas9 amino acid sequence depicted in FIG. 7.

[0067] In some cases, the Cas9 polypeptide used in a composition or method of the present disclosure is a Campylobacter jejuni Cas9 (CjCas9) polypeptide. CjCas9 recognizes the 5′-NNNVRYM-3′ as the protospacer-adjacent motif (PAM). One example of an amino acid sequence of CjCas9 is set forth in SEQ ID NO:50. In some cases, a Cas9 polypeptide suitable for use in a composition or method of the present disclosure comprises an amino acid sequence having at least 50%, at least 60%, at least 70%, at least 80%, at least 90%, at least 95%, at least 98%, at least 99%, or more than 99%, amino acid sequence identity to a CjCas9 amino acid sequence (e.g., the CjCas9 amino acid sequence set forth in SEQ ID NO:50).

[0068] In some cases, a suitable Cas9 polypeptide is a high-fidelity (HF) Cas9 polypeptide. Kleinstiver et al. (2016) Nature 529:490. For example, amino acids N497, R661, Q695, and Q926 of the amino acid sequence depicted in FIG. 6A are substituted, e.g., with alanine. For example, an HF Cas9 polypeptide can comprise an amino acid sequence having at least 90%, at least 95%, at least 98%, at least 99%, or 100%, amino acid sequence identity to the amino acid sequence depicted in FIG. 6A, where amino acids N497, R661, Q695, and Q926 are substituted, e.g., with alanine.

[0069] In some cases, the genome-editing endonuclease is a type V CRISPR/Cas endonuclease. In some cases a type V CRISPR/Cas endonuclease is a Cpf1 protein. In some cases, a Cpf1 protein comprises an amino acid sequence having at least 30%, at least 35%, at least 40%, at least 45%, at least 50%, at least 55%, at least 60%, at least 65%, at least 70%, at least 75%, at least 80%, at least 85%, at least 90%, at least 95%, at least 90%, or 100%, amino acid sequence identity to the Cpf1 amino acid sequence depicted in FIG. 8A, FIG. 8B, or FIG. 8C.

[0070] In some cases, a suitable Cas9 polypeptide exhibits altered PAM specificity. See, e.g., Kleinstiver et al. (2015) Nature 523:481.

[0071] RNA-Guided Endonucleases

[0072] An RNA-guided endonuclease is also referred to herein as a “genome editing nuclease.” Examples of suitable genome editing nucleases are CRISPR/Cas endonucleases (e.g., class 2 CRISPR/Cas endonucleases such as a type II, type V, or type VI CRISPR/Cas endonucleases). A suitable genome editing nuclease is a CRISPR/Cas endonuclease (e.g., a class 2 CRISPR/Cas endonuclease such as a type II, type V, or type VI CRISPR/Cas endonuclease). In some cases, a genome targeting composition includes a class 2 CRISPR/Cas endonuclease. In some cases, a genome targeting composition includes a class 2 type II CRISPR/Cas endonuclease (e.g., a Cas9 protein). In some cases, a genome targeting composition includes a class 2 type V CRISPR/Cas endonuclease (e.g., a Cpf1 protein, a C2c1 protein, or a C2c3 protein). In some cases, a genome targeting composition includes a class 2 type VI CRISPR/Cas endonuclease (e.g., a C2c2 protein; also referred to as a “Cas13a” protein). Also suitable for use is a CasX protein. Also suitable for use is a CasY protein.

[0073] In some cases, a genome editing nuclease is a fusion protein that is fused to a heterologous polypeptide (also referred to as a “fusion partner”). In some cases, a genome editing nuclease is fused to an amino acid sequence (a fusion partner) that provides for subcellular localization, i.e., the fusion partner is a subcellular localization sequence (e.g., one or more nuclear localization signals (NLSs) for targeting to the nucleus, two or more NLSs, three or more NLSs, etc.).

[0074] In some cases, the genome-editing endonuclease is a Type II CRISPR/Case endonuclease. In some cases, the genome-editing endonuclease is a Cas9 polypeptide. The Cas9 protein is guided to a target site (e.g., stabilized at a target site) within a target nucleic acid sequence (e.g., a chromosomal sequence or an extrachromosomal sequence, e.g., an episomal sequence, a minicircle sequence, a mitochondrial sequence, a chloroplast sequence, etc.) by virtue of its association with the protein-binding segment of the Cas9 guide RNA. In some cases, a Cas9 polypeptide comprises an amino acid sequence having at least 50%, at least 60%, at least 70%, at least 80%, at least 90%, at least 95%, at least 98%, at least 99%, or more than 99%, amino acid sequence identity to the Streptococcus pyogenes Cas9 depicted in FIG. 6A. In some cases, the Cas9 polypeptide used in a composition or method of the present disclosure is a Staphylococcus aureus Cas9 (saCas9) polypeptide. In some cases, the saCas9 polypeptide comprises an amino acid sequence having at least 85%, at least 90%, at least 95%, at least 98%, at least 99%, or 100%, amino acid sequence identity to the saCas9 amino acid sequence depicted in FIG. 7.

[0075] In some cases, a suitable Cas9 polypeptide is a high-fidelity (HF) Cas9 polypeptide. Kleinstiver et al. (2016) Nature 529:490. For example, amino acids N497, R661, Q695, and Q926 of the amino acid sequence depicted in FIG. 6A are substituted, e.g., with alanine. For example, an HF Cas9 polypeptide can comprise an amino acid sequence having at least 90%, at least 95%, at least 98%, at least 99%, or 100%, amino acid sequence identity to the amino acid sequence depicted in FIG. 6A, where amino acids N497, R661, Q695, and Q926 are substituted, e.g., with alanine.

[0076] In some cases, a suitable Cas9 polypeptide exhibits altered PAM specificity. See, e.g., Kleinstiver et al. (2015) Nature 523:481.

[0077] In some cases, the genome-editing endonuclease is a type V CRISPR/Cas endonuclease. In some cases a type V CRISPR/Cas endonuclease is a Cpf1 protein. In some cases, a Cpf1 protein comprises an amino acid sequence having at least 30%, at least 35%, at least 40%, at least 45%, at least 50%, at least 55%, at least 60%, at least 65%, at least 70%, at least 75%, at least 80%, at least 85%, at least 90%, at least 95%, at least 90%, or 100%, amino acid sequence identity to the Cpf1 amino acid sequence depicted in FIG. 8A. In some cases, a Cpf1 protein comprises an amino acid sequence having at least 30%, at least 35%, at least 40%, at least 45%, at least 50%, at least 55%, at least 60%, at least 65%, at least 70%, at least 75%, at least 80%, at least 85%, at least 90%, at least 95%, at least 90%, or 100%, amino acid sequence identity to the Cpf1 amino acid sequence depicted in FIG. 8B. In some cases, a Cpf1 protein comprises an amino acid sequence having at least 30%, at least 35%, at least 40%, at least 45%, at least 50%, at least 55%, at least 60%, at least 65%, at least 70%, at least 75%, at least 80%, at least 85%, at least 90%, at least 95%, at least 90%, or 100%, amino acid sequence identity to the Cpf1 amino acid sequence depicted in FIG. 8C.

[0078] A nucleic acid that binds to a class 2 CRISPR/Cas endonuclease (e.g., a Cas9 protein; a type V or type VI CRISPR/Cas protein; a Cpf1 protein; etc.) and targets the complex to a specific location within a target nucleic acid is referred to herein as a “guide RNA” or “CRISPR/Cas guide nucleic acid” or “CRISPR/Cas guide RNA.” A guide RNA provides target specificity to the complex (the RNP complex) by including a targeting segment, which includes a guide sequence (also referred to herein as a targeting sequence), which is a nucleotide sequence that is complementary to a sequence of a target nucleic acid.

[0079] In some cases, a guide RNA includes two separate nucleic acid molecules: an “activator” and a “targeter” and is referred to herein as a “dual guide RNA”, a “double-molecule guide RNA”, a “two-molecule guide RNA”, or a “dgRNA.” In some cases, the guide RNA is one molecule (e.g., for some class 2 CRISPR/Cas proteins, the corresponding guide RNA is a single molecule; and in some cases, an activator and targeter are covalently linked to one another, e.g., via intervening nucleotides), and the guide RNA is referred to as a “single guide RNA”, a “single-molecule guide RNA,” a “one-molecule guide RNA”, or simply “sgRNA.”

[0080] In some cases, a composition of the present disclosure comprises an RNA-guided endonuclease, or both an RNA-guided endonuclease and a guide RNA. In some cases, e.g., where a target nucleic acid comprises a deleterious mutation in a defective allele (e.g., a deleterious mutation in a retinal cell target nucleic acid), the RNA-guided endonuclease/guide RNA complex, together with a donor nucleic acid comprising a nucleotide sequence that corrects the deleterious mutation (e.g., a donor nucleic acid comprising a nucleotide sequence that encodes a functional copy of the protein encoded by the defective allele), can be used to correct the deleterious mutation, e.g., via homology-directed repair (HDR).

[0081] In some cases, a composition of the present disclosure comprises: i) an RNA-guided endonuclease; and ii) one guide RNA. In some cases, the guide RNA is a single-molecule (or “single guide”) guide RNA (a “sgRNA”). In some cases, the guide RNA is a dual-molecule (or “dual-guide”) guide RNA (“dgRNA”).

[0082] In some cases, a composition of the present disclosure comprises: i) an RNA-guided endonuclease; and ii) 2 separate sgRNAs, where the 2 separate sgRNAs provide for deletion of a target nucleic acid via non-homologous end joining (NHEJ). In some cases, the guide RNAs are sgRNAs. In some cases, the guide RNAs are dgRNAs.

[0083] In some cases, a composition of the present disclosure comprises: i) a Cpf1 polypeptide; and ii) a guide RNA precursor; in these cases, the precursor can be cleaved by the Cpf1 polypeptide to generate 2 or more guide RNAs.

[0084] Class 2 CRISPR/Cas Endonucleases

[0085] RNA-mediated adaptive immune systems in bacteria and archaea rely on Clustered Regularly Interspaced Short Palindromic Repeat (CRISPR) genomic loci and CRISPR-associated (Cas) proteins that function together to provide protection from invading viruses and plasmids. In class 2 CRISPR systems, the functions of the effector complex (e.g., the cleavage of target DNA) are carried out by a single endonuclease (e.g., see Zetsche et al., Cell. 2015 Oct. 22; 163(3):759-71; Makarova et al., Nat Rev Microbiol. 2015 November; 13(11):722-36; Shmakov et al., Mol Cell. 2015 Nov. 5; 60(3):385-97); and Shmakov et al. (2017) Nature Reviews Microbiology 15:169. As such, the term “class 2 CRISPR/Cas protein” is used herein to encompass the endonuclease (the target nucleic acid cleaving protein) from class 2 CRISPR systems. Thus, the term “class 2 CRISPR/Cas endonuclease” as used herein encompasses type II CRISPR/Cas proteins (e.g., Cas9); type V-A CRISPR/Cas proteins (e.g., Cpf1 (also referred to a “Cas12a”)); type V-B CRISPR/Cas proteins (e.g., C2c1 (also referred to as “Cas12b”)); type V-C CRISPR/Cas proteins (e.g., C2c3 (also referred to as “Cas12c”)); type V-U1 CRISPR/Cas proteins (e.g., C2c4); type V-U2 CRISPR/Cas proteins (e.g., C2c8); type V-U5 CRISPR/Cas proteins (e.g., C2c5); type V-U4 CRISPR/Cas proteins (e.g., C2c9); type V-U3 CRISPR/Cas proteins (e.g., C2c10); type VI-A CRISPR/Cas proteins (e.g., C2c2 (also known as “Cas13a”)); type VI-B CRISPR/Cas proteins (e.g., Cas13b (also known as C2c4)); and type VI-C CRISPR/Cas proteins (e.g., Cas13c (also known as C2c7)). To date, class 2 CRISPR/Cas proteins encompass type II, type V, and type VI CRISPR/Cas proteins, but the term is also meant to encompass any class 2 CRISPR/Cas protein suitable for binding to a corresponding guide RNA and forming an RNP complex.

[0086] Type II CRISPR/Cas Endonucleases (e.g., Cas 9)

[0087] In natural Type II CRISPR/Cas systems, Cas9 functions as an RNA-guided endonuclease that uses a dual-guide RNA having a crRNA and trans-activating crRNA (tracrRNA) for target recognition and cleavage by a mechanism involving two nuclease active sites in Cas9 that together generate double-stranded DNA breaks (DSBs), or can individually generate single-stranded DNA breaks (SSBs). The Type II CRISPR endonuclease Cas9 and engineered dual-(dgRNA) or single guide RNA (sgRNA) form a ribonucleoprotein (RNP) complex that can be targeted to a desired DNA sequence.

[0088] A type II CRISPR/Cas endonuclease is a type of class 2 CRISPR/Cas endonuclease. In some cases, the type II CRISPR/Cas endonuclease is a Cas9 protein. A Cas9 protein forms a complex with a Cas9 guide RNA. The guide RNA provides target specificity to a Cas9-guide RNA complex by having a nucleotide sequence (a guide sequence) that is complementary to a sequence (the target site) of a target nucleic acid (as described elsewhere herein). The Cas9 protein of the complex provides the site-specific activity. In other words, the Cas9 protein is guided to a target site (e.g., stabilized at a target site) within a target nucleic acid sequence (e.g. a chromosomal sequence or an extrachromosomal sequence, e.g., an episomal sequence, a minicircle sequence, a mitochondrial sequence, a chloroplast sequence, etc.) by virtue of its association with the protein-binding segment of the Cas9 guide RNA.

[0089] A Cas9 protein can bind and/or modify (e.g., cleave, nick, methylate, demethylate, etc.) a target nucleic acid and/or a polypeptide associated with target nucleic acid (e.g., methylation or acetylation of a histone tail)(e.g., when the Cas9 protein includes a fusion partner with an activity). In some cases, the Cas9 protein is a naturally-occurring protein (e.g., naturally occurs in bacterial and/or archaeal cells). In other cases, the Cas9 protein is not a naturally-occurring polypeptide (e.g., the Cas9 protein is a variant Cas9 protein).

[0090] Examples of suitable Cas9 proteins include, but are not limited to, those set forth in SEQ ID NOs: 5-816. Naturally occurring Cas9 proteins bind a Cas9 guide RNA, are thereby directed to a specific sequence within a target nucleic acid (a target site), and cleave the target nucleic acid (e.g., cleave dsDNA to generate a double strand break, cleave ssDNA, cleave ssRNA, etc.).

[0091] Assays to determine whether given protein interacts with a Cas9 guide RNA can be any convenient binding assay that tests for binding between a protein and a nucleic acid. Suitable binding assays (e.g., gel shift assays) will be known to one of ordinary skill in the art (e.g., assays that include adding a Cas9 guide RNA and a protein to a target nucleic acid).

[0092] Assays to determine whether a protein has an activity (e.g., to determine if the protein has nuclease activity that cleaves a target nucleic acid and/or some heterologous activity) can be any convenient assay (e.g., any convenient nucleic acid cleavage assay that tests for nucleic acid cleavage). Suitable assays (e.g., cleavage assays) will be known to one of ordinary skill in the art and can include adding a Cas9 guide RNA and a protein to a target nucleic acid.

[0093] Many Cas9 orthologs from a wide variety of species have been identified and in some cases the proteins share only a few identical amino acids. Identified Cas9 orthologs have similar domain architecture with a central HNH endonuclease domain and a split RuvC/RNaseH domain (e.g., RuvCI, RuvCII, and RuvCIII) (e.g., see Table 1). For example, a Cas9 protein can have 3 different regions (sometimes referred to as RuvC-I, RuvC-II, and RucC-III), that are not contiguous with respect to the primary amino acid sequence of the Cas9 protein, but fold together to form a RuvC domain once the protein is produced and folds. Thus, Cas9 proteins can be said to share at least 4 key motifs with a conserved architecture. Motifs 1, 2, and 4 are RuvC like motifs while motif 3 is an HNH-motif. The motifs set forth in Table 1 may not represent the entire RuvC-like and/or HNH domains as accepted in the art, but Table 1 does present motifs that can be used to help determine whether a given protein is a Cas9 protein.

TABLE 1
Table 1 lists 4 motifs that are present in Cas9 sequences
from various species. The amino acids listed in Table 1
are from the Cas9 from S. pyogenes (SEQ ID NO: 5).

| Motif # | Motif | Amino acids (residue #s) | Highly conserved |
|---|---|---|---|
| 1 | RuvC-like I | IGLDIGTNSVGWAVI (7-21) | D10, G12, G17 |
| | | (SEQ ID NO: 1) | |
| 2 | RuvC-like II | IVIEMARE (759-766) | E762 |
| | | (SEQ ID NO: 2) | |
| 3 | HNH-motif | DVDHIVPQSFLKDDSIDNKVLTRSDK | H840, N854, N863 |
| | | N (837-863) (SEQ ID NO: 3) | |
| 4 | RuvC-like | HHAHDAYL (982-989) | H982, H983, A984, |
| | III | (SEQ ID NO: 4) | D986, A987 |

[0094] In some cases, a suitable Cas9 protein comprises an amino acid sequence having 4 motifs, each of motifs 1-4 having 60% or more, 70% or more, 75% or more, 80% or more, 85% or more, 90% or more, 95% or more, 99% or more or 100% amino acid sequence identity to motifs 1-4 as set forth in SEQ ID NOs: 1-4, respectively (e.g., see Table 1), or to the corresponding portions in any of the amino acid sequences set forth in SEQ ID NOs: 5-816.

[0095] In other words, in some cases, a suitable Cas9 polypeptide comprises an amino acid sequence having 4 motifs, each of motifs 1-4 having 60% or more, 70% or more, 75% or more, 80% or more, 85% or more, 90% or more, 95% or more, 99% or more or 100% amino acid sequence identity to motifs 1-4 of the Cas9 amino acid sequence set forth in SEQ ID NO: 5 (e.g., the sequences set forth in SEQ ID NOs: 1-4, e.g., see Table 1), or to the corresponding portions in any of the amino acid sequences set forth in SEQ ID NOs: 6-816.

[0096] In some cases, a suitable Cas9 protein comprises an amino acid sequence having 4 motifs, each of motifs 1-4 having 60% or more amino acid sequence identity to motifs 1-4 of the Cas9 amino acid sequence set forth as SEQ ID NO: 5 (the motifs are in Table 1, and are set forth as SEQ ID NOs: 1-4, respectively), or to the corresponding portions in any of the amino acid sequences set forth in SEQ ID NOs: 6-816. In some cases, a suitable Cas9 protein comprises an amino acid sequence having 4 motifs, each of motifs 1-4 having 70% or more amino acid sequence identity to motifs 1-4 of the Cas9 amino acid sequence set forth as SEQ ID NO: 5 (the motifs are in Table 1, and are set forth as SEQ ID NOs: 1-4, respectively), or to the corresponding portions in any of the amino acid sequences set forth in SEQ ID NOs: 6-816. In some cases, a suitable Cas9 protein comprises an amino acid sequence having 4 motifs, each of motifs 1-4 having 75% or more amino acid sequence identity to motifs 1-4 of the Cas9 amino acid sequence set forth as SEQ ID NO: 5 (the motifs are in Table 1, and are set forth as SEQ ID NOs: 1-4, respectively), or to the corresponding portions in any of the amino acid sequences set forth in SEQ ID NOs: 6-816. In some cases, a suitable Cas9 protein comprises an amino acid sequence having 4 motifs, each of motifs 1-4 having 80% or more amino acid sequence identity to motifs 1-4 of the Cas9 amino acid sequence set forth as SEQ ID NO: 5 (the motifs are in Table 1, and are set forth as SEQ ID NOs: 1-4, respectively), or to the corresponding portions in any of the amino acid sequences set forth in SEQ ID NOs: 6-816. In some cases, a suitable Cas9 protein comprises an amino acid sequence having 4 motifs, each of motifs 1-4 having 85% or more amino acid sequence identity to motifs 1-4 of the Cas9 amino acid sequence set forth as SEQ ID NO: 5 (the motifs are in Table 1, and are set forth as SEQ ID NOs: 1-4, respectively), or to the corresponding portions in any of the amino acid sequences set forth in SEQ ID NOs: 6-816. In some cases, a suitable Cas9 protein comprises an amino acid sequence having 4 motifs, each of motifs 1-4 having 90% or more amino acid sequence identity to motifs 1-4 of the Cas9 amino acid sequence set forth as SEQ ID NO: 5 (the motifs are in Table 1, and are set forth as SEQ ID NOs: 1-4, respectively), or to the corresponding portions in any of the amino acid sequences set forth in SEQ ID NOs: 6-816. In some cases, a suitable Cas9 protein comprises an amino acid sequence having 4 motifs, each of motifs 1-4 having 95% or more amino acid sequence identity to motifs 1-4 of the Cas9 amino acid sequence set forth as SEQ ID NO: 5 (the motifs are in Table 1, and are set forth as SEQ ID NOs: 1-4, respectively), or to the corresponding portions in any of the amino acid sequences set forth in SEQ ID NOs: 6-816. In some cases, a suitable Cas9 protein comprises an amino acid sequence having 4 motifs, each of motifs 1-4 having 99% or more amino acid sequence identity to motifs 1-4 of the Cas9 amino acid sequence set forth as SEQ ID NO: 5 (the motifs are in Table 1, and are set forth as SEQ ID NOs: 1-4, respectively), or to the corresponding portions in any of the amino acid sequences set forth in SEQ ID NOs: 6-816. In some cases, a suitable Cas9 protein comprises an amino acid sequence having 4 motifs, each of motifs 1-4 having 100% amino acid sequence identity to motifs 1-4 of the Cas9 amino acid sequence set forth as SEQ ID NO: 5 (the motifs are in Table 1, and are set forth as SEQ ID NOs: 1-4, respectively), or to the corresponding portions in any of the amino acid sequences set forth in SEQ ID NOs: 6-816.

[0097] In some cases, a suitable Cas9 protein comprises an amino acid sequence having 60% or more, 70% or more, 75% or more, 80% or more, 85% or more, 90% or more, 95% or more, 99% or more or 100% amino acid sequence identity to amino acids 7-166 or 731-1003 of the Cas9 amino acid sequence set forth in SEQ ID NO: 5, or to the corresponding portions in any of the amino acid sequences set forth as SEQ ID NOs: 6-816.

[0098] Examples of various Cas9 proteins (and Cas9 domain structure) and Cas9 guide RNAs (as well as information regarding requirements related to protospacer adjacent motif (PAM) sequences present in targeted nucleic acids) can be found in the art, for example, see Jinek et al., Science. 2012 Aug. 17; 337(6096):816-21; Chylinski et al., RNA Biol. 2013 May; 10(5):726-37; Ma et al., Biomed Res Int. 2013; 2013:270805; Hou et al., Proc Natl Acad Sci USA. 2013 Sep. 24; 110(39):15644-9; Jinek et al., Elife. 2013; 2:e00471; Pattanayak et al., Nat Biotechnol. 2013 September; 31(9):839-43; Qi et al., Cell. 2013 Feb. 28; 152(5):1173-83; Wang et al., Cell. 2013 May 9; 153(4):910-8; Auer et al., Genome Res. 2013 Oct. 31; Chen et al., Nucleic Acids Res. 2013 Nov. 1; 41(20):e19; Cheng et al., Cell Res. 2013 October; 23(10):1163-71; Cho et al., Genetics. 2013 November; 195(3):1177-80; DiCarlo et al., Nucleic Acids Res. 2013 April; 41(7):4336-43; Dickinson et al., Nat Methods. 2013 October; 10(10):1028-34; Ebina et al., Sci Rep. 2013; 3:2510; Fujii et al., Nucleic Acids Res. 2013 Nov. 1; 41(20):e187; Hu et al., Cell Res. 2013 November; 23(11):1322-5; Jiang et al., Nucleic Acids Res. 2013 Nov. 1; 41(20):e188; Larson et al., Nat Protoc. 2013 November; 8(11):2180-96; Mali et al., Nat Methods. 2013 October; 10(10):957-63; Nakayama et al., Genesis. 2013 December; 51(12):835-43; Ran et al., Nat Protoc. 2013 November; 8(11):2281-308; Ran et al., Cell. 2013 Sep. 12; 154(6):1380-9; Upadhyay et al., G3 (Bethesda). 2013 Dec. 9; 3(12):2233-8; Walsh et al., Proc Natl Acad Sci USA. 2013 Sep. 24; 110(39):15514-5; Xie et al., Mol Plant. 2013 Oct. 9; Yang et al., Cell. 2013 Sep. 12; 154(6):1370-9; Briner et al., Mol Cell. 2014 Oct. 23; 56(2):333-9; Shmakov et al., Nat Rev Microbiol. 2017 March; 15(3):169-182; and U.S. patents and patent applications: U.S. Pat. Nos. 8,906,616; 8,895,308; 8,889,418; 8,889,356; 8,871,445; 8,865,406; 8,795,965; 8,771,945; 8,697,359; 20140068797; 20140170753; 20140179006; 20140179770; 20140186843; 20140186919; 20140186958; 20140189896; 20140227787; 20140234972; 20140242664; 20140242699; 20140242700; 20140242702; 20140248702; 20140256046; 20140273037; 20140273226; 20140273230; 20140273231; 20140273232; 20140273233; 20140273234; 20140273235; 20140287938; 20140295556; 20140295557; 20140298547; 20140304853; 20140309487; 20140310828; 20140310830; 20140315985; 20140335063; 20140335620; 20140342456; 20140342457; 20140342458; 20140349400; 20140349405; 20140356867; 20140356956; 20140356958; 20140356959; 20140357523; 20140357530; 20140364333; and 20140377868; each of which is hereby incorporated by reference in its entirety.

[0099] Type V and Type VI CRISPR/Cas Endonucleases

[0100] In some cases, a genome targeting composition of the present disclosure includes a type V or type VI CRISPR/Cas endonuclease (i.e., the genome editing endonuclease is a type V or type VI CRISPR/Cas endonuclease) (e.g., Cpf1, C2c1, C2c2, C2c3). Type V and type VI CRISPR/Cas endonucleases are a type of class 2 CRISPR/Cas endonuclease. Examples of type V CRISPR/Cas endonucleases include but are not limited to: Cpf1, C2c1, and C2c3. An example of a type VI CRISPR/Cas endonuclease is C2c2. In some cases, a subject genome targeting composition includes a type V CRISPR/Cas endonuclease (e.g., Cpf1, C2c1, C2c3). In some cases, a Type V CRISPR/Cas endonuclease is a Cpf1 protein. In some cases, a subject genome targeting composition includes a type VI CRISPR/Cas endonuclease (e.g., Cas13a).

[0101] Like type II CRISPR/Cas endonucleases, type V and VI CRISPR/Cas endonucleases form a complex with a corresponding guide RNA. The guide RNA provides target specificity to an endonuclease-guide RNA RNP complex by having a nucleotide sequence (a guide sequence) that is complementary to a sequence (the target site) of a target nucleic acid (as described elsewhere herein). The endonuclease of the complex provides the site-specific activity. In other words, the endonuclease is guided to a target site (e.g., stabilized at a target site) within a target nucleic acid sequence (e.g. a chromosomal sequence or an extrachromosomal sequence, e.g., an episomal sequence, a minicircle sequence, a mitochondrial sequence, a chloroplast sequence, etc.) by virtue of its association with the protein-binding segment of the guide RNA.

[0102] Examples and guidance related to type V and type VI CRISPR/Cas proteins (e.g., Cpf1, C2c1, C2c2, and C2c3 guide RNAs) can be found in the art, for example, see Zetsche et al., Cell. 2015 Oct. 22; 163(3):759-71; Makarova et al., Nat Rev Microbiol. 2015 November; 13(11):722-36; Shmakov et al., Mol Cell. 2015 Nov. 5; 60(3):385-97; and Shmakov et al. (2017) Nature Reviews Microbiology 15:169.

[0103] In some cases, the Type V or type VI CRISPR/Cas endonuclease (e.g., Cpf1, C2c1, C2c2, C2c3) is enzymatically active, e.g., the Type V or type VI CRISPR/Cas polypeptide, when bound to a guide RNA, cleaves a target nucleic acid.

[0104] In some cases a type V CRISPR/Cas endonuclease is a Cpf1 protein. In some cases, a Cpf1 protein comprises an amino acid sequence having at least 30%, at least 35%, at least 40%, at least 45%, at least 50%, at least 55%, at least 60%, at least 65%, at least 70%, at least 75%, at least 80%, at least 85%, at least 90%, at least 95%, at least 90%, or 100%, amino acid sequence identity to the Cpf1 amino acid sequence set forth in any of SEQ ID NOs: 818-822. In some cases, a Cpf1 protein comprises an amino acid sequence having at least 30%, at least 35%, at least 40%, at least 45%, at least 50%, at least 55%, at least 60%, at least 65%, at least 70%, at least 75%, at least 80%, at least 85%, at least 90%, at least 95%, at least 90%, or 100%, amino acid sequence identity to a contiguous stretch of from 100 amino acids to 200 amino acids (aa), from 200 aa to 400 aa, from 400 aa to 600 aa, from 600 aa to 800 aa, from 800 aa to 1000 aa, from 1000 aa to 1100 aa, from 1100 aa to 1200 aa, or from 1200 aa to 1300 aa, of the Cpf1 amino acid sequence set forth in any of SEQ ID NOs:818-822.

[0105] In some cases a type V CRISPR/Cas endonuclease is a C2c1 protein (examples include those set forth as SEQ ID NOs: 823-830). In some cases, a C2c1 protein comprises an amino acid sequence having at least 30%, at least 35%, at least 40%, at least 45%, at least 50%, at least 55%, at least 60%, at least 65%, at least 70%, at least 75%, at least 80%, at least 85%, at least 90%, at least 95%, at least 90%, or 100%, amino acid sequence identity to the C2c1 amino acid sequence set forth in any of SEQ ID NOs: 823-830. In some cases, a C2c1 protein comprises an amino acid sequence having at least 30%, at least 35%, at least 40%, at least 45%, at least 50%, at least 55%, at least 60%, at least 65%, at least 70%, at least 75%, at least 80%, at least 85%, at least 90%, at least 95%, at least 90%, or 100%, amino acid sequence identity to a contiguous stretch of from 100 amino acids to 200 amino acids (aa), from 200 aa to 400 aa, from 400 aa to 600 aa, from 600 aa to 800 aa, from 800 aa to 1000 aa, from 1000 aa to 1100 aa, from 1100 aa to 1200 aa, or from 1200 aa to 1300 aa, of the C2c1 amino acid sequence set forth in any of SEQ ID NOs: 823-830.

[0106] In some cases a type V CRISPR/Cas endonuclease is a C2c3 protein (examples include those set forth as SEQ ID NOs: 831-834). In some cases, a C2c3 protein comprises an amino acid sequence having at least 30%, at least 35%, at least 40%, at least 45%, at least 50%, at least 55%, at least 60%, at least 65%, at least 70%, at least 75%, at least 80%, at least 85%, at least 90%, at least 95%, at least 90%, or 100%, amino acid sequence identity to the C2c3 amino acid sequence set forth in any of SEQ ID NOs: 831-834. In some cases, a C2c3 protein comprises an amino acid sequence having at least 30%, at least 35%, at least 40%, at least 45%, at least 50%, at least 55%, at least 60%, at least 65%, at least 70%, at least 75%, at least 80%, at least 85%, at least 90%, at least 95%, at least 90%, or 100%, amino acid sequence identity to a contiguous stretch of from 100 amino acids to 200 amino acids (aa), from 200 aa to 400 aa, from 400 aa to 600 aa, from 600 aa to 800 aa, from 800 aa to 1000 aa, from 1000 aa to 1100 aa, from 1100 aa to 1200 aa, or from 1200 aa to 1300 aa, of the C2c3 amino acid sequence set forth in any of SEQ ID NOs: 831-834.

[0107] In some cases a type VI CRISPR/Cas endonuclease is a C2c2 protein (examples include those set forth as SEQ ID NOs: 835-846). In some cases, a C2c2 protein comprises an amino acid sequence having at least 30%, at least 35%, at least 40%, at least 45%, at least 50%, at least 55%, at least 60%, at least 65%, at least 70%, at least 75%, at least 80%, at least 85%, at least 90%, at least 95%, at least 90%, or 100%, amino acid sequence identity to the C2c2 amino acid sequence set forth in any of SEQ ID NOs: 835-846. In some cases, a C2c2 protein comprises an amino acid sequence having at least 30%, at least 35%, at least 40%, at least 45%, at least 50%, at least 55%, at least 60%, at least 65%, at least 70%, at least 75%, at least 80%, at least 85%, at least 90%, at least 95%, at least 90%, or 100%, amino acid sequence identity to a contiguous stretch of from 100 amino acids to 200 amino acids (aa), from 200 aa to 400 aa, from 400 aa to 600 aa, from 600 aa to 800 aa, from 800 aa to 1000 aa, from 1000 aa to 1100 aa, from 1100 aa to 1200 aa, or from 1200 aa to 1300 aa, of the C2c2 amino acid sequence set forth in any of SEQ ID NOs: 835-846.

[0108] Examples and guidance related to type V or type VI CRISPR/Cas endonucleases (including domain structure) and guide RNAs (as well as information regarding requirements related to protospacer adjacent motif (PAM) sequences present in targeted nucleic acids) can be found in the art, for example, see Zetsche et al., Cell. 2015 Oct. 22; 163(3):759-71; Makarova et al., Nat Rev Microbiol. 2015 November; 13(11):722-36; Shmakov et al., Mol Cell. 2015 Nov. 5; 60(3):385-97; and Shmakov et al., Nat Rev Microbiol. 2017 March; 15(3):169-182; and U.S. patents and patent applications: U.S. Pat. No. 9,580,701; 20170073695, 20170058272, 20160362668, 20160362667, 20160298078, 20160289637, 20160215300, 20160208243, and 20160208241, each of which is hereby incorporated by reference in its entirety.

[0109] CasX and CasY Proteins

[0110] Suitable RNA-guided endonucleases include CasX and CasY proteins. See, e.g., Burstein et al. (2017) Nature 542:237.

[0111] Nucleic Acid Modifications

[0112] In some embodiments, a subject nucleic acid (e.g., a guide RNA) has one or more modifications, e.g., a base modification, a backbone modification, a sugar modification, etc., to provide the nucleic acid with a new or enhanced feature (e.g., improved stability). A nucleoside is a base-sugar combination. The base portion of the nucleoside is normally a heterocyclic base. The two most common classes of such heterocyclic bases are the purines and the pyrimidines. Nucleotides are nucleosides that further include a phosphate group covalently linked to the sugar portion of the nucleoside. For those nucleosides that include a pentofuranosyl sugar, the phosphate group can be linked to the 2′, the 3′, or the 5′ hydroxyl moiety of the sugar. In forming oligonucleotides, the phosphate groups covalently link adjacent nucleosides to one another to form a linear polymeric compound. In turn, the respective ends of this linear polymeric compound can be further joined to form a circular compound, however, linear compounds are suitable. In addition, linear compounds may have internal nucleotide base complementarity and may therefore fold in a manner as to produce a fully or partially double-stranded compound. Within oligonucleotides, the phosphate groups are commonly referred to as forming the internucleoside backbone of the oligonucleotide. The normal linkage or backbone of RNA and DNA is a 3′ to 5′ phosphodiester linkage.

[0113] The guide RNA of the subject methods may include one or more modifications at or near the 5′ end. In some cases, the first three nucleotides at the 5′ end and/or the 3′ end of the guide RNA include nucleic acid modifications. In some instances, nucleic acid modifications at the 5′ end and/or the 3′ end of the guide RNA include three 2′-OMe 3′-phosphorothioates (3×MS).

[0114] Suitable nucleic acid modifications include, but are not limited to: 2′Omethyl modified nucleotides, 2′ Fluoro modified nucleotides, locked nucleic acid (LNA) modified nucleotides, peptide nucleic acid (PNA) modified nucleotides, nucleotides with phosphorothioate linkages, and a 5′ cap (e.g., a 7-methylguanylate cap (m7G)). Additional details and additional modifications are described below.

[0115] In some cases, 2% or more of the nucleotides of a nucleic acid (e.g., a guide RNA, etc.) are modified (e.g., 3% or more, 5% or more, 7.5% or more, 10% or more, 15% or more, 20% or more, 25% or more, 30% or more, 35% or more, 40% or more, 45% or more, 50% or more, 55% or more, 60% or more, 65% or more, 75% or more, 80% or more, 85% or more, 90% or more, 95% or more, or 100% of the nucleotides of a subject nucleic acid are modified). In some cases, 2% or more of the nucleotides of a subject nucleic acid are modified (e.g., 3% or more, 5% or more, 7.5% or more, 10% or more, 15% or more, 20% or more, 25% or more, 30% or more, 35% or more, 40% or more, 45% or more, 50% or more, 55% or more, 60% or more, 65% or more, 75% or more, 80% or more, 85% or more, 90% or more, 95% or more, or 100% of the nucleotides of a subject nucleic acid are modified). In some cases, 2% or more of the nucleotides of a nucleic acid are modified (e.g., 3% or more, 5% or more, 7.5% or more, 10% or more, 15% or more, 20% or more, 25% or more, 30% or more, 35% or more, 40% or more, 45% or more, 50% or more, 55% or more, 60% or more, 65% or more, 75% or more, 80% or more, 85% or more, 90% or more, 95% or more, or 100% of the nucleotides of a subject nucleic acid are modified).

[0116] In some cases, the number of nucleotides of a subject nucleic acid nucleic acid (e.g., a guide RNA etc.) that are modified is in a range of from 3% to 100% (e.g., 3% to 100%, 3% to 95%, 3% to 90%, 3% to 85%, 3% to 80%, 3% to 75%, 3% to 70%, 3% to 65%, 3% to 60%, 3% to 55%, 3% to 50%, 3% to 45%, 3% to 40%, 5% to 100%, 5% to 95%, 5% to 90%, 5% to 85%, 5% to 80%, 5% to 75%, 5% to 70%, 5% to 65%, 5% to 60%, 5% to 55%, 5% to 50%, 5% to 45%, 5% to 40%, 10% to 100%, 10% to 95%, 10% to 90%, 10% to 85%, 10% to 80%, 10% to 75%, 10% to 70%, 10% to 65%, 10% to 60%, 10% to 55%, 10% to 50%, 10% to 45%, or 10% to 40%). In some cases, the number of nucleotides of a subject that are modified is in a range of from 3% to 100% (e.g., 3% to 100%, 3% to 95%, 3% to 90%, 3% to 85%, 3% to 80%, 3% to 75%, 3% to 70%, 3% to 65%, 3% to 60%, 3% to 55%, 3% to 50%, 3% to 45%, 3% to 40%, 5% to 100%, 5% to 95%, 5% to 90%, 5% to 85%, 5% to 80%, 5% to 75%, 5% to 70%, 5% to 65%, 5% to 60%, 5% to 55%, 5% to 50%, 5% to 45%, 5% to 40%, 10% to 100%, 10% to 95%, 10% to 90%, 10% to 85%, 10% to 80%, 10% to 75%, 10% to 70%, 10% to 65%, 10% to 60%, 10% to 55%, 10% to 50%, 10% to 45%, or 10% to 40%). In some cases, the number of nucleotides of a subject nucleic acid that are modified is in a range of from 3% to 100% (e.g., 3% to 100%, 3% to 95%, 3% to 90%, 3% to 85%, 3% to 80%, 3% to 75%, 3% to 70%, 3% to 65%, 3% to 60%, 3% to 55%, 3% to 50%, 3% to 45%, 3% to 40%, 5% to 100%, 5% to 95%, 5% to 90%, 5% to 85%, 5% to 80%, 5% to 75%, 5% to 70%, 5% to 65%, 5% to 60%, 5% to 55%, 5% to 50%, 5% to 45%, 5% to 40%, 10% to 100%, 10% to 95%, 10% to 90%, 10% to 85%, 10% to 80%, 10% to 75%, 10% to 70%, 10% to 65%, 10% to 60%, 10% to 55%, 10% to 50%, 10% to 45%, or 10% to 40%).

[0117] In some cases, one or more of the nucleotides of a nucleic acid (e.g., a guide RNA, etc.) are modified (e.g., 2 or more, 3 or more, 4 or more, 5 or more, 6 or more, 7 or more, 8 or more, 9 or more, 10 or more, 11 or more, 12 or more, 13 or more, 14 or more, 15 or more, 16 or more, 17 or more, 18 or more, 19 or more, 20 or more, 21 or more, 22 or more, or all of the nucleotides of a subject nucleic acid are modified). In some cases, one or more of the nucleotides of a subject nucleic acid are modified (e.g., 2 or more, 3 or more, 4 or more, 5 or more, 6 or more, 7 or more, 8 or more, 9 or more, 10 or more, 11 or more, 12 or more, 13 or more, 14 or more, 15 or more, 16 or more, 17 or more, 18 or more, 19 or more, 20 or more, 21 or more, 22 or more, or all of the nucleotides of a subject nucleic acid are modified). In some cases, one or more of the nucleotides of a subject nucleic acid are modified (e.g., 2 or more, 3 or more, 4 or more, 5 or more, 6 or more, 7 or more, 8 or more, 9 or more, 10 or more, 11 or more, 12 or more, 13 or more, 14 or more, 15 or more, 16 or more, 17 or more, 18 or more, 19 or more, 20 or more, 21 or more, 22 or more, or all of the nucleotides of a subject nucleic acid are modified).

[0118] In some cases, 99% or less of the nucleotides of a nucleic acid (e.g., a guide RNA, etc.) are modified (e.g., 99% or less, 95% or less, 90% or less, 85% or less, 80% or less, 75% or less, 70% or less, 65% or less, 60% or less, 55% or less, 50% or less, or 45% or less of the nucleotides of a subject nucleic acid are modified). In some cases, 99% or less of the nucleotides of a subject nucleic acid are modified (e.g., e.g., 99% or less, 95% or less, 90% or less, 85% or less, 80% or less, 75% or less, 70% or less, 65% or less, 60% or less, 55% or less, 50% or less, or 45% or less of the nucleotides of a subject nucleic acid are modified). In some cases, 99% or less of the nucleotides of a subject nucleic acid are modified (e.g., 99% or less, 95% or less, 90% or less, 85% or less, 80% or less, 75% or less, 70% or less, 65% or less, 60% or less, 55% or less, 50% or less, or 45% or less of the nucleotides of a subject nucleic acid are modified).

[0119] In some cases, the number of nucleotides of a nucleic acid (e.g., a guide RNA, etc.) that are modified is in a range of from 1 to 30 (e.g., 1 to 25, 1 to 20, 1 to 18, 1 to 15, 1 to 10, 2 to 25, 2 to 20, 2 to 18, 2 to 15, 2 to 10, 3 to 25, 3 to 20, 3 to 18, 3 to 15, or 3 to 10). In some cases, the number of nucleotides of a subject nucleic acid that are modified is in a range of from 1 to 30 (e.g., 1 to 25, 1 to 20, 1 to 18, 1 to 15, 1 to 10, 2 to 25, 2 to 20, 2 to 18, 2 to 15, 2 to 10, 3 to 25, 3 to 20, 3 to 18, 3 to 15, or 3 to 10). In some cases, the number of nucleotides of a subject nucleic acid that are modified is in a range of from 1 to 30 (e.g., 1 to 25, 1 to 20, 1 to 18, 1 to 15, 1 to 10, 2 to 25, 2 to 20, 2 to 18, 2 to 15, 2 to 10, 3 to 25, 3 to 20, 3 to 18, 3 to 15, or 3 to 10).

[0120] In some cases, 20 or fewer of the nucleotides of a nucleic acid (e.g., a guide RNA, etc.) are modified (e.g., 19 or fewer, 18 or fewer, 17 or fewer, 16 or fewer, 15 or fewer, 14 or fewer, 13 or fewer, 12 or fewer, 11 or fewer, 10 or fewer, 9 or fewer, 8 or fewer, 7 or fewer, 6 or fewer, 5 or fewer, 4 or fewer, 3 or fewer, 2 or fewer, or one, of the nucleotides of a subject nucleic acid are modified). In some cases, 20 or fewer of the nucleotides of a subject nucleic acid are modified (e.g., 19 or fewer, 18 or fewer, 17 or fewer, 16 or fewer, 15 or fewer, 14 or fewer, 13 or fewer, 12 or fewer, 11 or fewer, 10 or fewer, 9 or fewer, 8 or fewer, 7 or fewer, 6 or fewer, 5 or fewer, 4 or fewer, 3 or fewer, 2 or fewer, or one, of the nucleotides of a subject nucleic acid are modified). In some cases, 20 or fewer of the nucleotides of a subject nucleic acid are modified (e.g., 19 or fewer, 18 or fewer, 17 or fewer, 16 or fewer, 15 or fewer, 14 or fewer, 13 or fewer, 12 or fewer, 11 or fewer, 10 or fewer, 9 or fewer, 8 or fewer, 7 or fewer, 6 or fewer, 5 or fewer, 4 or fewer, 3 or fewer, 2 or fewer, or one, of the nucleotides of a subject nucleic acid are modified).

[0121] A 2′-O-Methyl modified nucleotide (also referred to as 2′-O-Methyl RNA) is a naturally occurring modification of RNA found in tRNA and other small RNAs that arises as a post-transcriptional modification. Oligonucleotides can be directly synthesized that contain 2′-O-Methyl RNA. This modification increases Tm of RNA:RNA duplexes but results in only small changes in RNA:DNA stability. It is stable with respect to attack by single-stranded ribonucleases and is typically 5 to 10-fold less susceptible to DNases than DNA. It is commonly used in antisense oligos as a means to increase stability and binding affinity to the target message.

[0122] In some cases, 2% or more of the nucleotides of a nucleic acid (e.g., a guide RNA, etc.) are 2′-O-Methyl modified (e.g., 3% or more, 5% or more, 7.5% or more, 10% or more, 15% or more, 20% or more, 25% or more, 30% or more, 35% or more, 40% or more, 45% or more, 50% or more, 55% or more, 60% or more, 65% or more, 75% or more, 80% or more, 85% or more, 90% or more, 95% or more, or 100% of the nucleotides of a subject nucleic acid are 2′-O-Methyl modified). In some cases, 2% or more of the nucleotides of a subject nucleic acid are 2′-O-Methyl modified (e.g., 3% or more, 5% or more, 7.5% or more, 10% or more, 15% or more, 20% or more, 25% or more, 30% or more, 35% or more, 40% or more, 45% or more, 50% or more, 55% or more, 60% or more, 65% or more, 75% or more, 80% or more, 85% or more, 90% or more, 95% or more, or 100% of the nucleotides of a subject nucleic acid are 2′-O-Methyl modified). In some cases, 2% or more of the nucleotides of a subject nucleic acid are 2′-O-Methyl modified (e.g., 3% or more, 5% or more, 7.5% or more, 10% or more, 15% or more, 20% or more, 25% or more, 30% or more, 35% or more, 40% or more, 45% or more, 50% or more, 55% or more, 60% or more, 65% or more, 75% or more, 80% or more, 85% or more, 90% or more, 95% or more, or 100% of the nucleotides of a subject nucleic acid are 2′-O-Methyl modified).

[0123] In some cases, the number of nucleotides of a nucleic acid nucleic acid (e.g., a guide RNA, etc.) that are 2′-O-Methyl modified is in a range of from 3% to 100% (e.g., 3% to 100%, 3% to 95%, 3% to 90%, 3% to 85%, 3% to 80%, 3% to 75%, 3% to 70%, 3% to 65%, 3% to 60%, 3% to 55%, 3% to 50%, 3% to 45%, 3% to 40%, 5% to 100%, 5% to 95%, 5% to 90%, 5% to 85%, 5% to 80%, 5% to 75%, 5% to 70%, 5% to 65%, 5% to 60%, 5% to 55%, 5% to 50%, 5% to 45%, 5% to 40%, 10% to 100%, 10% to 95%, 10% to 90%, 10% to 85%, 10% to 80%, 10% to 75%, 10% to 70%, 10% to 65%, 10% to 60%, 10% to 55%, 10% to 50%, 10% to 45%, or 10% to 40%). In some cases, the number of nucleotides of a subject nucleic acid that are 2′-O-Methyl modified is in a range of from 3% to 100% (e.g., 3% to 100%, 3% to 95%, 3% to 90%, 3% to 85%, 3% to 80%, 3% to 75%, 3% to 70%, 3% to 65%, 3% to 60%, 3% to 55%, 3% to 50%, 3% to 45%, 3% to 40%, 5% to 100%, 5% to 95%, 5% to 90%, 5% to 85%, 5% to 80%, 5% to 75%, 5% to 70%, 5% to 65%, 5% to 60%, 5% to 55%, 5% to 50%, 5% to 45%, 5% to 40%, 10% to 100%, 10% to 95%, 10% to 90%, 10% to 85%, 10% to 80%, 10% to 75%, 10% to 70%, 10% to 65%, 10% to 60%, 10% to 55%, 10% to 50%, 10% to 45%, or 10% to 40%). In some cases, the number of nucleotides of a subject nucleic acid that are 2′-O-Methyl modified is in a range of from 3% to 100% (e.g., 3% to 100%, 3% to 95%, 3% to 90%, 3% to 85%, 3% to 80%, 3% to 75%, 3% to 70%, 3% to 65%, 3% to 60%, 3% to 55%, 3% to 50%, 3% to 45%, 3% to 40%, 5% to 100%, 5% to 95%, 5% to 90%, 5% to 85%, 5% to 80%, 5% to 75%, 5% to 70%, 5% to 65%, 5% to 60%, 5% to 55%, 5% to 50%, 5% to 45%, 5% to 40%, 10% to 100%, 10% to 95%, 10% to 90%, 10% to 85%, 10% to 80%, 10% to 75%, 10% to 70%, 10% to 65%, 10% to 60%, 10% to 55%, 10% to 50%, 10% to 45%, or 10% to 40%).

[0124] In some cases, one or more of the nucleotides of a nucleic acid (e.g., a guide RNA, etc.) are 2′-O-Methyl modified (e.g., 2 or more, 3 or more, 4 or more, 5 or more, 6 or more, 7 or more, 8 or more, 9 or more, 10 or more, 11 or more, 12 or more, 13 or more, 14 or more, 15 or more, 16 or more, 17 or more, 18 or more, 19 or more, 20 or more, 21 or more, 22 or more, or all of the nucleotides of a subject nucleic acid are 2′-O-Methyl modified). In some cases, one or more of the nucleotides of a subject nucleic acid are 2′-O-Methyl modified (e.g., 2 or more, 3 or more, 4 or more, 5 or more, 6 or more, 7 or more, 8 or more, 9 or more, 10 or more, 11 or more, 12 or more, 13 or more, 14 or more, 15 or more, 16 or more, 17 or more, 18 or more, 19 or more, 20 or more, 21 or more, 22 or more, or all of the nucleotides of a subject nucleic acid are 2′-O-Methyl modified). In some cases, one or more of the nucleotides of a subject nucleic acid are 2′-O-Methyl modified (e.g., 2 or more, 3 or more, 4 or more, 5 or more, 6 or more, 7 or more, 8 or more, 9 or more, 10 or more, 11 or more, 12 or more, 13 or more, 14 or more, 15 or more, 16 or more, 17 or more, 18 or more, 19 or more, 20 or more, 21 or more, 22 or more, or all of the nucleotides of a subject nucleic acid are 2′-O-Methyl modified).

[0125] In some cases, 99% or less of the nucleotides of a nucleic acid (e.g., a guide RNA, etc.) are 2′-O-Methyl modified (e.g., 99% or less, 95% or less, 90% or less, 85% or less, 80% or less, 75% or less, 70% or less, 65% or less, 60% or less, 55% or less, 50% or less, or 45% or less of the nucleotides of a subject nucleic acid are 2′-O-Methyl modified). In some cases, 99% or less of the nucleotides of a subject nucleic acid are 2′-O-Methyl modified (e.g., e.g., 99% or less, 95% or less, 90% or less, 85% or less, 80% or less, 75% or less, 70% or less, 65% or less, 60% or less, 55% or less, 50% or less, or 45% or less of the nucleotides of a subject nucleic acid are 2′-O-Methyl modified). In some cases, 99% or less of the nucleotides of a subject nucleic acid are 2′-O-Methyl modified (e.g., 99% or less, 95% or less, 90% or less, 85% or less, 80% or less, 75% or less, 70% or less, 65% or less, 60% or less, 55% or less, 50% or less, or 45% or less of the nucleotides of a subject nucleic acid are 2′-O-Methyl modified).

[0126] In some cases, the number of nucleotides of a nucleic acid nucleic acid (e.g., a guide RNA, etc.) that are 2′-O-Methyl modified is in a range of from 1 to 30 (e.g., 1 to 25, 1 to 20, 1 to 18, 1 to 15, 1 to 10, 2 to 25, 2 to 20, 2 to 18, 2 to 15, 2 to 10, 3 to 25, 3 to 20, 3 to 18, 3 to 15, or 3 to 10). In some cases, the number of nucleotides of a subject nucleic acid that are 2′-O-Methyl modified is in a range of from 1 to 30 (e.g., 1 to 25, 1 to 20, 1 to 18, 1 to 15, 1 to 10, 2 to 25, 2 to 20, 2 to 18, 2 to 15, 2 to 10, 3 to 25, 3 to 20, 3 to 18, 3 to 15, or 3 to 10). In some cases, the number of nucleotides of a subject nucleic acid that are 2′-O-Methyl modified is in a range of from 1 to 30 (e.g., 1 to 25, 1 to 20, 1 to 18, 1 to 15, 1 to 10, 2 to 25, 2 to 20, 2 to 18, 2 to 15, 2 to 10, 3 to 25, 3 to 20, 3 to 18, 3 to 15, or 3 to 10).

[0127] In some cases, 20 or fewer of the nucleotides of a nucleic acid (e.g., a guide RNA, etc.) are 2′-O-Methyl modified (e.g., 19 or fewer, 18 or fewer, 17 or fewer, 16 or fewer, 15 or fewer, 14 or fewer, 13 or fewer, 12 or fewer, 11 or fewer, 10 or fewer, 9 or fewer, 8 or fewer, 7 or fewer, 6 or fewer, 5 or fewer, 4 or fewer, 3 or fewer, 2 or fewer, or one, of the nucleotides of a subject nucleic acid are 2′-O-Methyl modified). In some cases, 20 or fewer of the nucleotides of a subject nucleic acid are 2′-O-Methyl modified (e.g., 19 or fewer, 18 or fewer, 17 or fewer, 16 or fewer, 15 or fewer, 14 or fewer, 13 or fewer, 12 or fewer, 11 or fewer, 10 or fewer, 9 or fewer, 8 or fewer, 7 or fewer, 6 or fewer, 5 or fewer, 4 or fewer, 3 or fewer, 2 or fewer, or one, of the nucleotides of a subject nucleic acid are 2′-O-Methyl modified). In some cases, 20 or fewer of the nucleotides of a subject nucleic acid are 2′-O-Methyl modified (e.g., 19 or fewer, 18 or fewer, 17 or fewer, 16 or fewer, 15 or fewer, 14 or fewer, 13 or fewer, 12 or fewer, 11 or fewer, 10 or fewer, 9 or fewer, 8 or fewer, 7 or fewer, 6 or fewer, 5 or fewer, 4 or fewer, 3 or fewer, 2 or fewer, or one, of the nucleotides of a subject nucleic acid are 2′-O-Methyl modified).

[0128] 2′ Fluoro modified nucleotides (e.g., 2′ Fluoro bases) have a fluorine modified ribose which increases binding affinity (Tm) and also confers some relative nuclease resistance when compared to native RNA. These modifications are commonly employed in ribozymes and siRNAs to improve stability in serum or other biological fluids.

[0129] In some cases, 2% or more of the nucleotides of a nucleic acid (e.g., a guide RNA, etc.) are 2′ Fluoro modified (e.g., 3% or more, 5% or more, 7.5% or more, 10% or more, 15% or more, 20% or more, 25% or more, 30% or more, 35% or more, 40% or more, 45% or more, 50% or more, 55% or more, 60% or more, 65% or more, 75% or more, 80% or more, 85% or more, 90% or more, 95% or more, or 100% of the nucleotides of a subject nucleic acid are 2′ Fluoro modified). In some cases, 2% or more of the nucleotides of a subject nucleic acid are 2′ Fluoro modified (e.g., 3% or more, 5% or more, 7.5% or more, 10% or more, 15% or more, 20% or more, 25% or more, 30% or more, 35% or more, 40% or more, 45% or more, 50% or more, 55% or more, 60% or more, 65% or more, 75% or more, 80% or more, 85% or more, 90% or more, 95% or more, or 100% of the nucleotides of a subject nucleic acid are 2′ Fluoro modified). In some cases, 2% or more of the nucleotides of a subject nucleic acid are 2′ Fluoro modified (e.g., 3% or more, 5% or more, 7.5% or more, 10% or more, 15% or more, 20% or more, 25% or more, 30% or more, 35% or more, 40% or more, 45% or more, 50% or more, 55% or more, 60% or more, 65% or more, 75% or more, 80% or more, 85% or more, 90% or more, 95% or more, or 100% of the nucleotides of a subject nucleic acid are 2′ Fluoro modified).

[0130] In some cases, the number of nucleotides of a nucleic acid nucleic acid (e.g., a guide RNA, etc.) that are 2′ Fluoro modified is in a range of from 3% to 100% (e.g., 3% to 100%, 3% to 95%, 3% to 90%, 3% to 85%, 3% to 80%, 3% to 75%, 3% to 70%, 3% to 65%, 3% to 60%, 3% to 55%, 3% to 50%, 3% to 45%, 3% to 40%, 5% to 100%, 5% to 95%, 5% to 90%, 5% to 85%, 5% to 80%, 5% to 75%, 5% to 70%, 5% to 65%, 5% to 60%, 5% to 55%, 5% to 50%, 5% to 45%, 5% to 40%, 10% to 100%, 10% to 95%, 10% to 90%, 10% to 85%, 10% to 80%, 10% to 75%, 10% to 70%, 10% to 65%, 10% to 60%, 10% to 55%, 10% to 50%, 10% to 45%, or 10% to 40%). In some cases, the number of nucleotides of a subject nucleic acid that are 2′ Fluoro modified is in a range of from 3% to 100% (e.g., 3% to 100%, 3% to 95%, 3% to 90%, 3% to 85%, 3% to 80%, 3% to 75%, 3% to 70%, 3% to 65%, 3% to 60%, 3% to 55%, 3% to 50%, 3% to 45%, 3% to 40%, 5% to 100%, 5% to 95%, 5% to 90%, 5% to 85%, 5% to 80%, 5% to 75%, 5% to 70%, 5% to 65%, 5% to 60%, 5% to 55%, 5% to 50%, 5% to 45%, 5% to 40%, 10% to 100%, 10% to 95%, 10% to 90%, 10% to 85%, 10% to 80%, 10% to 75%, 10% to 70%, 10% to 65%, 10% to 60%, 10% to 55%, 10% to 50%, 10% to 45%, or 10% to 40%). In some cases, the number of nucleotides of a subject nucleic acid that are 2′ Fluoro modified is in a range of from 3% to 100% (e.g., 3% to 100%, 3% to 95%, 3% to 90%, 3% to 85%, 3% to 80%, 3% to 75%, 3% to 70%, 3% to 65%, 3% to 60%, 3% to 55%, 3% to 50%, 3% to 45%, 3% to 40%, 5% to 100%, 5% to 95%, 5% to 90%, 5% to 85%, 5% to 80%, 5% to 75%, 5% to 70%, 5% to 65%, 5% to 60%, 5% to 55%, 5% to 50%, 5% to 45%, 5% to 40%, 10% to 100%, 10% to 95%, 10% to 90%, 10% to 85%, 10% to 80%, 10% to 75%, 10% to 70%, 10% to 65%, 10% to 60%, 10% to 55%, 10% to 50%, 10% to 45%, or 10% to 40%).

[0131] In some cases, one or more of the nucleotides of a nucleic acid (e.g., a guide RNA, etc.) are 2′ Fluoro modified (e.g., 2 or more, 3 or more, 4 or more, 5 or more, 6 or more, 7 or more, 8 or more, 9 or more, 10 or more, 11 or more, 12 or more, 13 or more, 14 or more, 15 or more, 16 or more, 17 or more, 18 or more, 19 or more, 20 or more, 21 or more, 22 or more, or all of the nucleotides of a subject nucleic acid are 2′ Fluoro modified). In some cases, one or more of the nucleotides of a subject nucleic acid are 2′ Fluoro modified (e.g., 2 or more, 3 or more, 4 or more, 5 or more, 6 or more, 7 or more, 8 or more, 9 or more, 10 or more, 11 or more, 12 or more, 13 or more, 14 or more, 15 or more, 16 or more, 17 or more, 18 or more, 19 or more, 20 or more, 21 or more, 22 or more, or all of the nucleotides of a subject nucleic acid are 2′ Fluoro modified). In some cases, one or more of the nucleotides of a subject nucleic acid are 2′ Fluoro modified (e.g., 2 or more, 3 or more, 4 or more, 5 or more, 6 or more, 7 or more, 8 or more, 9 or more, 10 or more, 11 or more, 12 or more, 13 or more, 14 or more, 15 or more, 16 or more, 17 or more, 18 or more, 19 or more, 20 or more, 21 or more, 22 or more, or all of the nucleotides of a subject nucleic acid are 2′ Fluoro modified).

[0132] In some cases, 99% or less of the nucleotides of a nucleic acid (e.g., a guide RNA, etc.) are 2′ Fluoro modified (e.g., 99% or less, 95% or less, 90% or less, 85% or less, 80% or less, 75% or less, 70% or less, 65% or less, 60% or less, 55% or less, 50% or less, or 45% or less of the nucleotides of a subject nucleic acid are 2′ Fluoro modified). In some cases, 99% or less of the nucleotides of a subject nucleic acid are 2′ Fluoro modified (e.g., e.g., 99% or less, 95% or less, 90% or less, 85% or less, 80% or less, 75% or less, 70% or less, 65% or less, 60% or less, 55% or less, 50% or less, or 45% or less of the nucleotides of a subject nucleic acid are 2′ Fluoro modified). In some cases, 99% or less of the nucleotides of a subject nucleic acid are 2′ Fluoro modified (e.g., 99% or less, 95% or less, 90% or less, 85% or less, 80% or less, 75% or less, 70% or less, 65% or less, 60% or less, 55% or less, 50% or less, or 45% or less of the nucleotides of a subject nucleic acid are 2′ Fluoro modified).

[0133] In some cases, the number of nucleotides of a nucleic acid nucleic acid (e.g., a guide RNA, etc.) that are 2′ Fluoro modified is in a range of from 1 to 30 (e.g., 1 to 25, 1 to 20, 1 to 18, 1 to 15, 1 to 10, 2 to 25, 2 to 20, 2 to 18, 2 to 15, 2 to 10, 3 to 25, 3 to 20, 3 to 18, 3 to 15, or 3 to 10). In some cases, the number of nucleotides of a subject nucleic acid that are 2′ Fluoro modified is in a range of from 1 to 30 (e.g., 1 to 25, 1 to 20, 1 to 18, 1 to 15, 1 to 10, 2 to 25, 2 to 20, 2 to 18, 2 to 15, 2 to 10, 3 to 25, 3 to 20, 3 to 18, 3 to 15, or 3 to 10). In some cases, the number of nucleotides of a subject nucleic acid that are 2′ Fluoro modified is in a range of from 1 to 30 (e.g., 1 to 25, 1 to 20, 1 to 18, 1 to 15, 1 to 10, 2 to 25, 2 to 20, 2 to 18, 2 to 15, 2 to 10, 3 to 25, 3 to 20, 3 to 18, 3 to 15, or 3 to 10).

[0134] In some cases, 20 or fewer of the nucleotides of a nucleic acid (e.g., a guide RNA, etc.) are 2′ Fluoro modified (e.g., 19 or fewer, 18 or fewer, 17 or fewer, 16 or fewer, 15 or fewer, 14 or fewer, 13 or fewer, 12 or fewer, 11 or fewer, 10 or fewer, 9 or fewer, 8 or fewer, 7 or fewer, 6 or fewer, 5 or fewer, 4 or fewer, 3 or fewer, 2 or fewer, or one, of the nucleotides of a subject nucleic acid are 2′ Fluoro modified). In some cases, 20 or fewer of the nucleotides of a subject nucleic acid are 2′ Fluoro modified (e.g., 19 or fewer, 18 or fewer, 17 or fewer, 16 or fewer, 15 or fewer, 14 or fewer, 13 or fewer, 12 or fewer, 11 or fewer, 10 or fewer, 9 or fewer, 8 or fewer, 7 or fewer, 6 or fewer, 5 or fewer, 4 or fewer, 3 or fewer, 2 or fewer, or one, of the nucleotides of a subject nucleic acid are 2′ Fluoro modified). In some cases, 20 or fewer of the nucleotides of a subject nucleic acid are 2′ Fluoro modified (e.g., 19 or fewer, 18 or fewer, 17 or fewer, 16 or fewer, 15 or fewer, 14 or fewer, 13 or fewer, 12 or fewer, 11 or fewer, 10 or fewer, 9 or fewer, 8 or fewer, 7 or fewer, 6 or fewer, 5 or fewer, 4 or fewer, 3 or fewer, 2 or fewer, or one, of the nucleotides of a subject nucleic acid are 2′ Fluoro modified).

[0135] LNA bases have a modification to the ribose backbone that locks the base in the C3′-endo position, which favors RNA A-type helix duplex geometry. This modification significantly increases Tm and is also very nuclease resistant. Multiple LNA insertions can be placed in an oligo at any position except the 3′-end. Applications have been described ranging from antisense oligos to hybridization probes to SNP detection and allele specific PCR. Due to the large increase in Tm conferred by LNAs, they also can cause an increase in primer dimer formation as well as self-hairpin formation. In some cases, the number of LNAs incorporated into a single oligo is 10 bases or less.

[0136] In some cases, the number of nucleotides of a nucleic acid nucleic acid (e.g., a guide RNA, etc.) that have an LNA base is in a range of from 3% to 99% (e.g., 3% to 99%, 3% to 95%, 3% to 90%, 3% to 85%, 3% to 80%, 3% to 75%, 3% to 70%, 3% to 65%, 3% to 60%, 3% to 55%, 3% to 50%, 3% to 45%, 3% to 40%, 5% to 99%, 5% to 95%, 5% to 90%, 5% to 85%, 5% to 80%, 5% to 75%, 5% to 70%, 5% to 65%, 5% to 60%, 5% to 55%, 5% to 50%, 5% to 45%, 5% to 40%, 10% to 99%, 10% to 95%, 10% to 90%, 10% to 85%, 10% to 80%, 10% to 75%, 10% to 70%, 10% to 65%, 10% to 60%, 10% to 55%, 10% to 50%, 10% to 45%, or 10% to 40%). In some cases, the number of nucleotides of a subject nucleic acid that have an LNA base is in a range of from 3% to 99% (e.g., 3% to 99%, 3% to 95%, 3% to 90%, 3% to 85%, 3% to 80%, 3% to 75%, 3% to 70%, 3% to 65%, 3% to 60%, 3% to 55%, 3% to 50%, 3% to 45%, 3% to 40%, 5% to 99%, 5% to 95%, 5% to 90%, 5% to 85%, 5% to 80%, 5% to 75%, 5% to 70%, 5% to 65%, 5% to 60%, 5% to 55%, 5% to 50%, 5% to 45%, 5% to 40%, 10% to 99%, 10% to 95%, 10% to 90%, 10% to 85%, 10% to 80%, 10% to 75%, 10% to 70%, 10% to 65%, 10% to 60%, 10% to 55%, 10% to 50%, 10% to 45%, or 10% to 40%). In some cases, the number of nucleotides of a subject nucleic acid that have an LNA base is in a range of from 3% to 99% (e.g., 3% to 99%, 3% to 95%, 3% to 90%, 3% to 85%, 3% to 80%, 3% to 75%, 3% to 70%, 3% to 65%, 3% to 60%, 3% to 55%, 3% to 50%, 3% to 45%, 3% to 40%, 5% to 99%, 5% to 95%, 5% to 90%, 5% to 85%, 5% to 80%, 5% to 75%, 5% to 70%, 5% to 65%, 5% to 60%, 5% to 55%, 5% to 50%, 5% to 45%, 5% to 40%, 10% to 99%, 10% to 95%, 10% to 90%, 10% to 85%, 10% to 80%, 10% to 75%, 10% to 70%, 10% to 65%, 10% to 60%, 10% to 55%, 10% to 50%, 10% to 45%, or 10% to 40%).

[0137] In some cases, one or more of the nucleotides of a nucleic acid (e.g., a guide RNA, etc.) have an LNA base (e.g., 2 or more, 3 or more, 4 or more, 5 or more, 6 or more, 7 or more, 8 or more, 9 or more, 10 or more, 11 or more, 12 or more, 13 or more, 14 or more, 15 or more, 16 or more, 17 or more, 18 or more, 19 or more, 20 or more, 21 or more, 22 or more, or all of the nucleotides of a subject nucleic acid have an LNA base). In some cases, one or more of the nucleotides of a subject nucleic acid have an LNA base (e.g., 2 or more, 3 or more, 4 or more, 5 or more, 6 or more, 7 or more, 8 or more, 9 or more, 10 or more, 11 or more, 12 or more, 13 or more, 14 or more, 15 or more, 16 or more, 17 or more, 18 or more, 19 or more, 20 or more, 21 or more, 22 or more, or all of the nucleotides of a subject nucleic acid have an LNA base). In some cases, one or more of the nucleotides of a subject nucleic acid have an LNA base (e.g., 2 or more, 3 or more, 4 or more, 5 or more, 6 or more, 7 or more, 8 or more, 9 or more, 10 or more, 11 or more, 12 or more, 13 or more, 14 or more, 15 or more, 16 or more, 17 or more, 18 or more, 19 or more, 20 or more, 21 or more, 22 or more, or all of the nucleotides of a subject nucleic acid have an LNA base).

[0138] In some cases, 99% or less of the nucleotides of a nucleic acid (e.g., a guide RNA, etc.) have an LNA base (e.g., 99% or less, 95% or less, 90% or less, 85% or less, 80% or less, 75% or less, 70% or less, 65% or less, 60% or less, 55% or less, 50% or less, or 45% or less of the nucleotides of a subject nucleic acid have an LNA base). In some cases, 99% or less of the nucleotides of a subject nucleic acid have an LNA base (e.g., e.g., 99% or less, 95% or less, 90% or less, 85% or less, 80% or less, 75% or less, 70% or less, 65% or less, 60% or less, 55% or less, 50% or less, or 45% or less of the nucleotides of a subject nucleic acid have an LNA base). In some cases, 99% or less of the nucleotides of a subject nucleic acid have an LNA base (e.g., 99% or less, 95% or less, 90% or less, 85% or less, 80% or less, 75% or less, 70% or less, 65% or less, 60% or less, 55% or less, 50% or less, or 45% or less of the nucleotides of a subject nucleic acid have an LNA base).

[0139] In some cases, the number of nucleotides of a nucleic acid nucleic acid (e.g., a guide RNA, etc.) that have an LNA base is in a range of from 1 to 30 (e.g., 1 to 25, 1 to 20, 1 to 18, 1 to 15, 1 to 10, 2 to 25, 2 to 20, 2 to 18, 2 to 15, 2 to 10, 3 to 25, 3 to 20, 3 to 18, 3 to 15, or 3 to 10). In some cases, the number of nucleotides of a subject nucleic acid that have an LNA base is in a range of from 1 to 30 (e.g., 1 to 25, 1 to 20, 1 to 18, 1 to 15, 1 to 10, 2 to 25, 2 to 20, 2 to 18, 2 to 15, 2 to 10, 3 to 25, 3 to 20, 3 to 18, 3 to 15, or 3 to 10). In some cases, the number of nucleotides of a subject nucleic acid that have an LNA base is in a range of from 1 to 30 (e.g., 1 to 25, 1 to 20, 1 to 18, 1 to 15, 1 to 10, 2 to 25, 2 to 20, 2 to 18, 2 to 15, 2 to 10, 3 to 25, 3 to 20, 3 to 18, 3 to 15, or 3 to 10).

[0140] In some cases, 20 or fewer of the nucleotides of a nucleic acid (e.g., a guide RNA, etc.) have an LNA base (e.g., 19 or fewer, 18 or fewer, 17 or fewer, 16 or fewer, 15 or fewer, 14 or fewer, 13 or fewer, 12 or fewer, 11 or fewer, 10 or fewer, 9 or fewer, 8 or fewer, 7 or fewer, 6 or fewer, 5 or fewer, 4 or fewer, 3 or fewer, 2 or fewer, or one, of the nucleotides of a subject nucleic acid have an LNA base). In some cases, 20 or fewer of the nucleotides of a subject nucleic acid have an LNA base (e.g., 19 or fewer, 18 or fewer, 17 or fewer, 16 or fewer, 15 or fewer, 14 or fewer, 13 or fewer, 12 or fewer, 11 or fewer, 10 or fewer, 9 or fewer, 8 or fewer, 7 or fewer, 6 or fewer, 5 or fewer, 4 or fewer, 3 or fewer, 2 or fewer, or one, of the nucleotides of a subject nucleic acid have an LNA base). In some cases, 20 or fewer of the nucleotides of a subject nucleic acid have an LNA base (e.g., 19 or fewer, 18 or fewer, 17 or fewer, 16 or fewer, 15 or fewer, 14 or fewer, 13 or fewer, 12 or fewer, 11 or fewer, 10 or fewer, 9 or fewer, 8 or fewer, 7 or fewer, 6 or fewer, 5 or fewer, 4 or fewer, 3 or fewer, 2 or fewer, or one, of the nucleotides of a subject nucleic acid have an LNA base).

[0141] The phosphorothioate (PS) bond (i.e., a phosphorothioate linkage) substitutes a sulfur atom for a non-bridging oxygen in the phosphate backbone of a nucleic acid (e.g., an oligo). This modification renders the internucleotide linkage resistant to nuclease degradation. Phosphorothioate bonds can be introduced between the last 3-5 nucleotides at the 5′- or 3′-end of the oligo to inhibit exonuclease degradation. Including phosphorothioate bonds within the oligo (e.g., throughout the entire oligo) can help reduce attack by endonucleases as well.

[0142] In some cases, the number of nucleotides of a nucleic acid nucleic acid (e.g., a guide RNA, etc.) that have a phosphorothioate linkage is in a range of from 3% to 99% (e.g., 3% to 99%, 3% to 95%, 3% to 90%, 3% to 85%, 3% to 80%, 3% to 75%, 3% to 70%, 3% to 65%, 3% to 60%, 3% to 55%, 3% to 50%, 3% to 45%, 3% to 40%, 5% to 99%, 5% to 95%, 5% to 90%, 5% to 85%, 5% to 80%, 5% to 75%, 5% to 70%, 5% to 65%, 5% to 60%, 5% to 55%, 5% to 50%, 5% to 45%, 5% to 40%, 10% to 99%, 10% to 95%, 10% to 90%, 10% to 85%, 10% to 80%, 10% to 75%, 10% to 70%, 10% to 65%, 10% to 60%, 10% to 55%, 10% to 50%, 10% to 45%, or 10% to 40%). In some cases, the number of nucleotides of a subject nucleic acid that have a phosphorothioate linkage is in a range of from 3% to 99% (e.g., 3% to 99%, 3% to 95%, 3% to 90%, 3% to 85%, 3% to 80%, 3% to 75%, 3% to 70%, 3% to 65%, 3% to 60%, 3% to 55%, 3% to 50%, 3% to 45%, 3% to 40%, 5% to 99%, 5% to 95%, 5% to 90%, 5% to 85%, 5% to 80%, 5% to 75%, 5% to 70%, 5% to 65%, 5% to 60%, 5% to 55%, 5% to 50%, 5% to 45%, 5% to 40%, 10% to 99%, 10% to 95%, 10% to 90%, 10% to 85%, 10% to 80%, 10% to 75%, 10% to 70%, 10% to 65%, 10% to 60%, 10% to 55%, 10% to 50%, 10% to 45%, or 10% to 40%). In some cases, the number of nucleotides of a subject nucleic acid that have a phosphorothioate linkage is in a range of from 3% to 99% (e.g., 3% to 99%, 3% to 95%, 3% to 90%, 3% to 85%, 3% to 80%, 3% to 75%, 3% to 70%, 3% to 65%, 3% to 60%, 3% to 55%, 3% to 50%, 3% to 45%, 3% to 40%, 5% to 99%, 5% to 95%, 5% to 90%, 5% to 85%, 5% to 80%, 5% to 75%, 5% to 70%, 5% to 65%, 5% to 60%, 5% to 55%, 5% to 50%, 5% to 45%, 5% to 40%, 10% to 99%, 10% to 95%, 10% to 90%, 10% to 85%, 10% to 80%, 10% to 75%, 10% to 70%, 10% to 65%, 10% to 60%, 10% to 55%, 10% to 50%, 10% to 45%, or 10% to 40%).

[0143] In some cases, one or more of the nucleotides of a nucleic acid (e.g., a guide RNA, etc.) have a phosphorothioate linkage (e.g., 2 or more, 3 or more, 4 or more, 5 or more, 6 or more, 7 or more, 8 or more, 9 or more, 10 or more, 11 or more, 12 or more, 13 or more, 14 or more, 15 or more, 16 or more, 17 or more, 18 or more, 19 or more, 20 or more, 21 or more, 22 or more, or all of the nucleotides of a subject nucleic acid have a phosphorothioate linkage). In some cases, one or more of the nucleotides of a subject nucleic acid have a phosphorothioate linkage (e.g., 2 or more, 3 or more, 4 or more, 5 or more, 6 or more, 7 or more, 8 or more, 9 or more, 10 or more, 11 or more, 12 or more, 13 or more, 14 or more, 15 or more, 16 or more, 17 or more, 18 or more, 19 or more, 20 or more, 21 or more, 22 or more, or all of the nucleotides of a subject nucleic acid have a phosphorothioate linkage). In some cases, one or more of the nucleotides of a nucleic acid have a phosphorothioate linkage (e.g., 2 or more, 3 or more, 4 or more, 5 or more, 6 or more, 7 or more, 8 or more, 9 or more, 10 or more, 11 or more, 12 or more, 13 or more, 14 or more, 15 or more, 16 or more, 17 or more, 18 or more, 19 or more, 20 or more, 21 or more, 22 or more, or all of the nucleotides of a nucleic acid have a phosphorothioate linkage).

[0144] In some cases, 99% or less of the nucleotides of a nucleic acid (e.g., a guide RNA, etc.) have a phosphorothioate linkage (e.g., 99% or less, 95% or less, 90% or less, 85% or less, 80% or less, 75% or less, 70% or less, 65% or less, 60% or less, 55% or less, 50% or less, or 45% or less of the nucleotides of a subject nucleic acid have a phosphorothioate linkage). In some cases, 99% or less of the nucleotides of a subject nucleic acid have a phosphorothioate linkage (e.g., e.g., 99% or less, 95% or less, 90% or less, 85% or less, 80% or less, 75% or less, 70% or less, 65% or less, 60% or less, 55% or less, 50% or less, or 45% or less of the nucleotides of a nucleic acid have a phosphorothioate linkage). In some cases, 99% or less of the nucleotides of a nucleic acid have a phosphorothioate linkage (e.g., 99% or less, 95% or less, 90% or less, 85% or less, 80% or less, 75% or less, 70% or less, 65% or less, 60% or less, 55% or less, 50% or less, or 45% or less of the nucleotides of a nucleic acid have a phosphorothioate linkage).

[0145] In some cases, the number of nucleotides of a nucleic acid nucleic acid (e.g., a guide RNA, etc.) that have a phosphorothioate linkage is in a range of from 1 to 30 (e.g., 1 to 25, 1 to 20, 1 to 18, 1 to 15, 1 to 10, 2 to 25, 2 to 20, 2 to 18, 2 to 15, 2 to 10, 3 to 25, 3 to 20, 3 to 18, 3 to 15, or 3 to 10). In some cases, the number of nucleotides of a nucleic acid that have a phosphorothioate linkage is in a range of from 1 to 30 (e.g., 1 to 25, 1 to 20, 1 to 18, 1 to 15, 1 to 10, 2 to 25, 2 to 20, 2 to 18, 2 to 15, 2 to 10, 3 to 25, 3 to 20, 3 to 18, 3 to 15, or 3 to 10). In some cases, the number of nucleotides of a nucleic acid that have a phosphorothioate linkage is in a range of from 1 to 30 (e.g., 1 to 25, 1 to 20, 1 to 18, 1 to 15, 1 to 10, 2 to 25, 2 to 20, 2 to 18, 2 to 15, 2 to 10, 3 to 25, 3 to 20, 3 to 18, 3 to 15, or 3 to 10).

[0146] In some cases, 20 or fewer of the nucleotides of a nucleic acid (e.g., a guide RNA, etc.) have a phosphorothioate linkage (e.g., 19 or fewer, 18 or fewer, 17 or fewer, 16 or fewer, 15 or fewer, 14 or fewer, 13 or fewer, 12 or fewer, 11 or fewer, 10 or fewer, 9 or fewer, 8 or fewer, 7 or fewer, 6 or fewer, 5 or fewer, 4 or fewer, 3 or fewer, 2 or fewer, or one, of the nucleotides of a subject nucleic acid have a phosphorothioate linkage). In some cases, 20 or fewer of the nucleotides of a nucleic acid have a phosphorothioate linkage (e.g., 19 or fewer, 18 or fewer, 17 or fewer, 16 or fewer, 15 or fewer, 14 or fewer, 13 or fewer, 12 or fewer, 11 or fewer, 10 or fewer, 9 or fewer, 8 or fewer, 7 or fewer, 6 or fewer, 5 or fewer, 4 or fewer, 3 or fewer, 2 or fewer, or one, of the nucleotides of a subject nucleic acid have a phosphorothioate linkage). In some cases, 20 or fewer of the nucleotides of a nucleic acid have a phosphorothioate linkage (e.g., 19 or fewer, 18 or fewer, 17 or fewer, 16 or fewer, 15 or fewer, 14 or fewer, 13 or fewer, 12 or fewer, 11 or fewer, 10 or fewer, 9 or fewer, 8 or fewer, 7 or fewer, 6 or fewer, 5 or fewer, 4 or fewer, 3 or fewer, 2 or fewer, or one, of the nucleotides of a nucleic acid have a phosphorothioate linkage).

[0147] In some cases, a nucleic acid (e.g., a guide RNA, etc.) has one or more nucleotides that are 2′-O-Methyl modified nucleotides. In some embodiments, a subject nucleic acid (e.g., a guide RNA, etc.) has one or more 2′ Fluoro modified nucleotides. In some cases, a subject nucleic acid (e.g., a guide RNA, etc.) has one or more LNA bases. In some cases, a subject nucleic acid (e.g., a guide RNA, etc.) has one or more nucleotides that are linked by a phosphorothioate bond (i.e., the subject nucleic acid has one or more phosphorothioate linkages). In some embodiments, a subject nucleic acid (e.g., a guide RNA, etc.) has a 5′ cap (e.g., a 7-methylguanylate cap (m7G)).

[0148] In some cases, a subject nucleic acid has a combination of modified nucleotides. For example, a nucleic acid can have a 5′ cap (e.g., a 7-methylguanylate cap (m7G)) in addition to having one or more nucleotides with other modifications (e.g., a 2′-O-Methyl nucleotide and/or a 2′ Fluoro modified nucleotide and/or a LNA base and/or a phosphorothioate linkage). A nucleic acid can have any combination of modifications. For example, a subject nucleic acid can have any combination of the above described modifications.

[0149] In some cases, a subject nucleic acid has one or more nucleotides that are 2′-O-Methyl modified nucleotides. In some embodiments, a subject nucleic acid has one or more 2′ Fluoro modified nucleotides. In some embodiments, a subject nucleic acid has one or more LNA bases. In some embodiments, a subject nucleic acid has one or more nucleotides that are linked by a phosphorothioate bond (i.e., the subject nucleic acid has one or more phosphorothioate linkages). In some embodiments, a subject nucleic acid has a 5′ cap (e.g., a 7-methylguanylate cap (m7G)).

[0150] In some cases, a subject nucleic acid has a combination of modified nucleotides. For example, a subject nucleic acid can have a 5′ cap (e.g., a 7-methylguanylate cap (m7G)) in addition to having one or more nucleotides with other modifications (e.g., a 2′-O-Methyl nucleotide and/or a 2′ Fluoro modified nucleotide and/or a LNA base and/or a phosphorothioate linkage). A subject nucleic acid can have any combination of modifications. For example, a subject nucleic acid can have any combination of the above described modifications.

[0151] Modified Backbones and Modified Internucleoside Linkages

[0152] Examples of suitable nucleic acids containing modifications include nucleic acids containing modified backbones or non-natural internucleoside linkages. Nucleic acids having modified backbones include those that retain a phosphorus atom in the backbone and those that do not have a phosphorus atom in the backbone.

[0153] Suitable modified oligonucleotide backbones containing a phosphorus atom therein include, for example, phosphorothioates, chiral phosphorothioates, phosphorodithioates, phosphotriesters, aminoalkylphosphotriesters, methyl and other alkyl phosphonates including 3′-alkylene phosphonates, 5′-alkylene phosphonates and chiral phosphonates, phosphinates, phosphoramidates including 3′-amino phosphoramidate and aminoalkylphosphoramidates, phosphorodiamidates, thionophosphoramidates, thionoalkylphosphonates, thionoalkylphosphotriesters, selenophosphates and boranophosphates having normal 3′-5′ linkages, 2′-5′ linked analogs of these, and those having inverted polarity wherein one or more internucleotide linkages is a 3′ to 3′,5′ to 5′ or 2′ to 2′ linkage. Suitable oligonucleotides having inverted polarity comprise a single 3′ to 3′ linkage at the 3′-most internucleotide linkage i.e. a single inverted nucleoside residue which may be a basic (the nucleobase is missing or has a hydroxyl group in place thereof). Various salts (such as, for example, potassium or sodium), mixed salts and free acid forms are also included.

[0154] In some cases, a nucleic acid comprises one or more phosphorothioate and/or heteroatom internucleoside linkages, in particular —CH₂—NH—O—CH₂—, —CH₂—N(CH₃)—O—CH₂— (known as a methylene (methylimino) or MMI backbone), —CH₂—O—N(CH₃)—CH₂—, —CH₂—N(CH₃)—N(CH₃)—CH₂— and —O—N(CH₃)—CH₂—CH₂— (wherein the native phosphodiester internucleotide linkage is represented as —O—P(═O)(OH)—O—CH₂—). MMI type internucleoside linkages are disclosed in the above referenced U.S. Pat. No. 5,489,677. Suitable amide internucleoside linkages are disclosed in t U.S. Pat. No. 5,602,240.

[0155] Also suitable are nucleic acids having morpholino backbone structures as described in, e.g., U.S. Pat. No. 5,034,506. For example, in some embodiments, a subject nucleic acid comprises a 6-membered morpholino ring in place of a ribose ring. In some of these embodiments, a phosphorodiamidate or other non-phosphodiester internucleoside linkage replaces a phosphodiester linkage.

[0156] Suitable modified polynucleotide backbones that do not include a phosphorus atom therein have backbones that are formed by short chain alkyl or cycloalkyl internucleoside linkages, mixed heteroatom and alkyl or cycloalkyl internucleoside linkages, or one or more short chain heteroatomic or heterocyclic internucleoside linkages. These include those having morpholino linkages (formed in part from the sugar portion of a nucleoside); siloxane backbones; sulfide, sulfoxide and sulfone backbones; formacetyl and thioformacetyl backbones; methylene formacetyl and thioformacetyl backbones; riboacetyl backbones; alkene containing backbones; sulfamate backbones; methyleneimino and methylenehydrazino backbones; sulfonate and sulfonamide backbones; amide backbones; and others having mixed N, O, S and CH₂ component parts.

### Methods of Treating Sickle Cell Disease

[0157] The present disclosure provides a method of treating sickle cell disease (SCD) in an individual. The method may include a) modifying a globin gene in the genome of a hematopoietic stem/progenitor cell (HSPC) obtained from the individual according to any embodiment of the subject methods, thereby generating an in vitro mixed population, wherein at least 2%, e.g., at least 5%, at least 10%, at least 15%, at least 20%, at least 25%, at least 30%, at least 35%, at least 40%, at least 45%, at least 50%, or more than 50%, of the SCD-associated SNPs have been corrected in the in vitro mixed population; and b) administering the in vitro mixed population to the individual, thereby treating the SCD in the individual. The term “treated individual” as used herein may refer to an individual to whom an in vitro mixed population has been administered.

[0158] In some cases, the administering of the in vitro mixed population produces an engrafted population. The administering may include, e.g., infusing the in vitro mixed population into an individual, engrafting the in vitro mixed population into an individual, transplanting the in vitro mixed population into an individual, etc. The administering of the in vitro mixed population may occur after ablation of the bone marrow in an individual. By “engrafted population” is meant a population of transplanted cells such as a population of cells including, e.g., cells of the administered in vitro mixed population, cells derived from the administered in vitro mixed population, etc. The engrafted population may include population may include three populations of cells: 1) a population of cells that have two non-corrected β-globin alleles with SCD-associated SNPs; 2) a population of cells that have only one β-globin allele with an SCD-associated SNP that has been corrected; and 3) a population of cells that have two β-globin alleles with SCD-associated SNPs that have been corrected. In some cases, the population of cells having two non-corrected β-globin alleles includes cells where one or more β-globin alleles have been knocked out. The knockout of one or more β-globin alleles may be due to non-homologous end joining (NHEJ) where small insertions or deletions (indels) are inserted at the site of cleavage, where the indels cause functional disruption through introduction of non-specific mutations at the cleavage location. The engrafted population may include viable HSCs capable of long-term self-renewal. In some cases, the percentage of the β-globin alleles with SCD-associated SNPs that have been corrected in the engrafted population is at least 2%, e.g., at least 5%, at least 10%, at least 15%, at least 20%, at least 25%, at least 30%, at least 35%, at least 40%, at least 45%, at least 50%, or more than 50%. In some cases, at least 2% of the β-globin alleles with SCD-associated SNPs have been corrected; for example at least 2%, at least 5%, at least 10%, at least 15%, at least 20%, at least 25%, at least 30%, at least 35%, at least 40%, at least 45%, at least 50%, or more than 50%, of the β-globin alleles in the engrafted population have a corrected SCD-associated SNP. A β-globin allele with a “corrected SCD-associated SNP” encodes a polypeptide subunit for forming HbA (and not HbS).

[0159] The corrected SCD alleles in the in vitro mixed population may be maintained in the engrafted population after administering the in vitro mixed population to an individual. The administering may include infusing any suitable dose or effective amount of the in vitro mixed population, e.g., a dose suitable to produce an engrafted population into an individual. In certain embodiments, the administering may include a dose of any suitable amount of an in vitro mixed population, e.g., a thawed in vitro mixed population previously cryopreserved, as described above. In some cases, a single dose of the in vitro mixed population is administered. In some cases, the method includes administering an effective amount of at least 10⁶ to 10⁹ cells from the in vitro mixed population, e.g., CD34⁺ HSPCs, per kilogram of body weight of the individual, such as, e.g., at least 10⁶ to 10⁷ cells from the in vitro mixed population per kilogram of body weight of the individual. In some cases, the method includes administering an effective amount of cells/kg ranging from 1.5×10⁶ to 1×10⁷ cells from the in vitro mixed population/kg of body weight, 2×10⁶ cells from the in vitro mixed population/kg of body weight to 3×10⁶ cells from the in vitro mixed population/kg of body weight, or 5×10⁶ cells from the in vitro mixed population/kg to 1×10⁷ cells from the in vitro mixed population/kg of body weight. In some cases, from about 0.5×10⁶ cells/kg to about 20×10⁶ cells/kg are harvested from a patient; these harvested cells are used to generate an in vitro mixed population, suitable for re-introduction into the patient, of about 3×10⁶ cells/kg.

[0160] Any suitable percentage of cells, e.g., bone marrow cells, in the engrafted population may have zero, one, or two corrected SCD-associated SNPs after a period of time, e.g., after the administering of the in vitro mixed population to an individual, and/or any suitable percentage of the total SCD-associated SNPs may be corrected after a period of time. The period of time may range from 1 day to 6 months after administration, from 6 months to 12 months after administration, from 1 year to 2 years after administration, or for a period of time after administration that lasts up to the years in the individual's lifespan. In some cases, the period of time is at least one month following said administering, at least 6 months following said administering, at least 1 year following said administering, or at least 2 years following said administering. In certain embodiments, 2% to 95% of cells of the engrafted population comprise two non-corrected SCD-associated SNPs after a period of time after said administering such as, e.g., 2% to 80% of cells, 2% to 70% of cells, 2% to 60% of cells, 2% to 50% of cells, 2% to 40% of cells, 2% to 30%, or 2% to 20% of cells. In certain embodiments, 2% to 95% of cells of the engrafted population comprise only one corrected SCD-associated SNP after a period of time after said administering such as, e.g., 2% to 80% of cells, 2% to 70% of cells, 2% to 60% of cells, 2% to 50% of cells, 2% to 40% of cells, 2% to 30%, or 2% to 20% of cells. The one corrected SCD-associated SNP may remain corrected for a period of time after engraftment up to the lifespan of the individual. In certain embodiments, 2% to 95% of cells of the engrafted population comprise two corrected SCD-associated SNPs after a period of time after said administering such as, e.g., 2% to 80% of cells, 2% to 70% of cells, 2% to 60% of cells, 2% to 50% of cells, 2% to 40% of cells, 2% to 30%, or 2% to 20% of cells. The two corrected SCD-associated SNPs may remain corrected for a period of time after engraftment up to the lifespan of the individual. In certain embodiments, 2% to 95% of cells from the engrafted population comprise at least one corrected SCD-associated SNP after a period of time after said administering such as, e.g., 2% to 80% of cells, 2% to 70% of cells, 2% to 60% of cells, 2% to 50% of cells, 2% to 40% of cells, 2% to 30%, or 2% to 20% of cells. In some cases, 20% of the engrafted population comprises at least one corrected SCD-associated SNP after a period of time ranging from 1 day to 6 months after administration, from 6 months to 12 months after administration, from 1 year to 2 years after administration, up to the years in the individual's lifespan. In some cases, the period of time is at least one month following said administering, at least 6 months following said administering, at least 1 year following said administering, or at least 2 years following said administering. In some cases, 0% to 95% of the SCD-associated SNPs in the engrafted population are corrected after a period of time after said administering such as, e.g., 0% to 80% of the SCD-associated SNPs, 0% to 70% of the SCD-associated SNPs, 0% to 60% of the SCD-associated SNPs, 0% to 50% of the SCD-associated SNPs, 0% to 40% of the SCD-associated SNPs, 0% to 30% of the SCD-associated SNPs, or 0% to 20% of the SCD-associated SNPs. In some cases, 2% to 95% of the SCD-associated SNPs in the engrafted population are corrected after a period of time after said administering such as, e.g., 2% to 80% of the SCD-associated SNPs, 2% to 70% of the SCD-associated SNPs, 2% to 60% of the SCD-associated SNPs, 2% to 50% of the SCD-associated SNPs, 2% to 40% of the SCD-associated SNPs, 2% to 30% of the SCD-associated SNPs, or 2% to 20% of the SCD-associated SNPs. The corrected SCD-associated SNPs in the engrafted population may remain corrected for a period of time after engraftment up to the lifespan of the individual. In some instances, 20% of the SCD-associated SNPs are corrected after a period of time ranging from 1 day to 6 months after administration, from 6 months to 12 months after administration, from 1 year to 2 years after administration, or for a period of time after administration that lasts up to the years in the individual's lifespan. In some cases, the period of time may be at least one month following said administering, at least 6 months following said administering, at least 1 year following said administering, or at least 2 years following said administering. In some cases, 2% to 95% of the SCD-associated SNPs remain corrected after a period of time such as, e.g., 2% to 90% of the SCD-associated SNPs, 2% to 80% of the SCD-associated SNPs, 2% to 70% of the SCD-associated SNPs, 2% to 60% of the SCD-associated SNPs, or 2% to 50% of the SCD-associated SNPs. In some instances, 20% of the SCD-associated SNPs remain corrected after a period of time ranging 1 day to 6 months after administration, from 6 months to 12 months after administration, from 1 year to 2 years after administration, or for a period of time after administration that lasts up to the years in the individual's lifespan. In some cases, the period of time is at least one month following said administering, at least 6 months following said administering, at least 1 year following said administering, or at least 2 years following said administering. In some cases, 2% to 95% of the total SCD alleles are the corrected SCD allele in the engrafted population of the treated individual after a period of time such as, e.g., 2% to 90% of the total SCD alleles, 2% to 80% of the total SCD alleles, 2% to 70% of the total SCD alleles, 2% to 60% of the total SCD alleles, or 2% to 50% of the total SCD alleles. The corrected SCD allele may remain corrected for a period of time ranging from 1 day to 6 months after administration, from 6 months to 12 months after administration, from 1 year to 2 years after administration, or for a period of time after administration that lasts up to the years in the individual's lifespan. In some cases, the period of time is at least one month following said administering, at least 6 months following said administering, at least 1 year following said administering, or at least 2 years following said administering.

[0161] In some cases, the engrafted population includes a population of HSCs having at least one corrected SCD-associated SNP that remains corrected for a period of time after administering the in vitro mixed population to the individual. The period of time may be at least one month following said administering, at least 6 months following said administering, at least 1 year following said administering, or at least 2 years following said administering. In some cases, the at least one corrected SCD-associated SNP remains corrected after said administering for the individual's lifetime. In some cases, 2% to 20% of HSCs in the engrafted population comprise at least one corrected SCD-associated SNP that remains corrected for a period of time; for example, 2% to 25% of HSCs, 2% to 30% of HSCs, 2% to 35% of HSCs, 2% to 40% of HSCs, 2% to 45% of HSCs, 2% to 50%, or 50% or more of HSCs in the engrafted population comprise at least one corrected SCD-associated SNP that remains corrected for a period of time after said administering. The population of HSCs having at least one corrected SCD-associated SNP that remains corrected for a period of time after said administering may provide for circulating red blood cells (RBCs) that comprise HbA. For example, the population of HSCs having at least one corrected SCD-associated SNP that remains corrected for a period of time after said administering may provide for circulating RBCs in the individual that comprise HbA, wherein at least 40% of the total circulating RBCs in the individual comprise HbA, at least 50% of the total circulating RBCs comprise HbA, at least 60% of the total circulating RBCs comprise HbA, at least 70% of the total circulating RBCs comprise HbA, at least 80% of the total circulating RBCs comprise HbA, or at least 90% of the total circulating RBCs comprise HbA. In some cases, 2% to 20% of HSCs having at least one corrected SCD-associated SNP that remains corrected for a period of time after said administering may provide for circulating RBCs that comprise HbA, where at least 40% of the total circulating RBCs in the individual comprise HbA.

[0162] In some cases, the method provides for circulating red blood cells (RBCs) in the individual that include zero, one, or two corrected SCD-associated SNPs after a period of time. The period of time may range from 1 day to 6 months after administration, from 6 months to 12 months after administration, from 1 year to 2 years after administration, or for a period of time after administration that lasts up to the years in the individual's lifespan. In some cases, the period of time is at least one month following said administering, at least 6 months following said administering, at least 1 year following said administering, or at least 2 years following said administering. In certain embodiments, 2% to 95% of circulating red blood cells in the individual comprise two non-corrected SCD-associated SNPs after a period of time such as, e.g., 2% to 90% of RBCs, 2% to 80% of RBCs, 2% to 70% of RBCs, 2% to 60% of RBCs, 2% to 50% of RBCs or 2% to 40% of RBCs. In certain embodiments, 2% to 95% of circulating red blood cells in the individual comprise only one corrected SCD-associated SNP after a period of time such as, e.g., 2% to 90% of RBCs, 2% to 80% of RBCs, 2% to 70% of RBCs, 2% to 60% of RBCs, 2% to 50%, or 2 to 40% of RBCs. In certain embodiments, 2% to 95% of circulating red blood cells in the individual comprise two corrected SCD-associated SNPs after a period of time such as, e.g., 2% to 90% of RBCs, 2% to 80% of RBCs, 2% to 70% of RBCs, 2% to 60% of RBCs, 2% to 50% of RBCs, or 2% to 40% of RBCs. In certain embodiments, 2% to 95% of circulating red blood cells in the individual comprise HbA after a period of time such as, e.g., 2% to 90% of RBCs, 2% to 80% of RBCs, 2% to 70% of RBCs, 2% to 60% of RBCs, 2% to 50% of RBCs, or 2% to 40% of RBCs. In some cases, at least 99% of circulating red blood cells in the individual comprise HbA after a period of time after administering the in vitro mixed population; for example, at least 95% of circulating RBCs, at least 90% of circulating RBCs, at least 85% of circulating RBCs, at least 80% of circulating RBCs, at least 75% of circulating RBCs, at least 70% of circulating RBCs, at least 65% of circulating RBCs, at least 60% of circulating RBCs, at least 55% of circulating RBCs, at least 50% of circulating RBCs, at least 45% of circulating RBCs, or at least 40% of circulating RBCs in the individual comprise HbA after a period of time after administering the in vitro mixed population. In some cases, 2% to 20% of the total SCD alleles are the corrected SCD allele in the population of circulating RBCs of the treated individual after a period of time.

[0163] The subject methods may provide an increase in circulating normal RBCs after a period of time. In some cases, the circulating RBCs have a wild type morphology after a period of time. By “wild type morphology” is meant a healthy RBC morphology, e.g., the morphology of a normal, mature RBC. Cells having a wild type morphology may have a normal size and may be, e.g., biconcave, disc-shaped, anuclear cells measuring approximately 7-8 microns in diameter with an internal volume of 80-100 fL. In certain embodiments, 2% to 95% of circulating RBCs have a wild type morphology after a period of time such as, e.g., 5% to 90% of RBCs, 10% to 80% of RBCs, 20% to 70% of RBCs, 30% to 60% of RBCs, or 40% to 50% of RBCs. The period of time may range from 1 day to 6 months after administration of the in vitro mixed population, from 6 months to 12 months after administration, from 1 year to 2 years after administration, or for a period of time after administration that lasts up to the years in the individual's lifespan. In some cases, the period of time is at least one month following said administering, at least 6 months following said administering, at least 1 year following said administering, or at least 2 years following said administering. In some cases, the circulating RBCs have improved survival relative to the survival of RBCs in untreated individuals. The circulating RBCs in a treated individual may survive for 70 days to 130 days such as, e.g., for 80 days to 120 days, for 90 days to 120 days, or for 100 days to 120 days. The circulating RBCs in a treated individual may survive for 2 to 100 more days such as, e.g., for 5 to 50 more days, for 10 to 30 more days, or for 15 to 20 more days than circulating RBCs in an untreated individual.

[0164] The administering may provide for the production of normal hemoglobin, e.g., as measured by HPLC. In some cases, the administering provides for production of hemoglobin A (HbA) in the individual. The administering may provide for a ratio of HbA to hemoglobin S (HbS) in the individual of at least 0.1:1.0, such as, e.g., at least 0.25:1.0, at least 0.5:1.0, at least 0.75:1.0, at least 1.0:1.0, at least 1.25:1.0, at least 1.5:1.0, or at least 1.75:1.0. In some cases, the administering provides for production of hemoglobin F (HbF) in the individual. In some cases, the administering provides for a ratio of HbF to HbS in the individual of at least 0.01:1.0 such as, e.g., at least 0.025:1.0, at least 0.05:1.0, at least 0.075:1.0 at least 0.1:1.0, at least 0.2:1.0, at least 0.3:1.0, at least 0.4:1.0, at least 0.5:1:0, at least 0.75:1.0, at least 1.0:1.0, at least 1.25:1.0, at least 1.5:1.0, or at least 1.75:1.0. In some cases, the administering provides for an amount of HbS that is less than 95% of the total hemoglobin in serum such as, e.g., less than 90%, less than 80%, less than 70%, less than 60%, less than 50%, less than 40%, less than 30%, less than 20%, less than 10%, or less than 5% of the total hemoglobin in serum. In some cases, the administering provides for an amount of HbA and HbF, e.g., the sum of the amount of HbA and the amount of HbF, that is 2% to 95% of the total hemoglobin in serum such as, e.g., 5% to 90% of the total hemoglobin in serum, 10% to 80% of the total hemoglobin in serum, 20% to 70% of the total hemoglobin in serum, 30% to 60% of the total hemoglobin in serum, or 40% to 50% of the total hemoglobin in serum. In some cases, the administering provides for an amount of HbA and HbF that is 50% of the total hemoglobin in serum or greater than 50% of the total hemoglobin in serum. In some cases, the administering provides for 2% to 95% HbS in serum such as, e.g., 5% to 90% HbS in serum, 10% to 80% HbS in serum, 20% to 70% HbS in serum, 30% to 60% HbS in serum, or 40% to 50% HbS in serum. In some cases, the administering provides 2% to 95% HbA in serum such as, e.g., 2% to 95% HbA in serum such as, e.g., 5% to 90% HbA in serum, 10% to 80% HbA in serum, 20% to 70% HbA in serum, 30% to 60% HbA in serum, or 30% to 50% HbA in serum. In some cases, the administering provides for 2% to 45% HbF in serum such as, e.g., for 10% to 45% HbF in serum, for 15% to 45% HbF in serum, 20% to 45% HbF in serum, or for 25% to 40% HbF in serum. The production, e.g., amounts, of HbA, HbF, and/or HbS may be determined after a period of time. The ratios of HbA:HbS and/or HbA:HbF may be determined after a period of time. The period of time may range from 1 day to 6 months after administration, from 6 months to 12 months after administration, from 1 year to 2 years after administration, or for a period of time after administration that lasts up to the years in the individual's lifespan. In some cases, the period of time is at least one month following said administering, at least 6 months following said administering, at least 1 year following said administering, or at least 2 years following said administering.

[0165] The methods of treating may provide the reduction of adverse symptoms associated with sickle cell disease (SCD) after a period of time after administering the in vitro mixed population. The period of time may range from 1 day to 6 months after administration, from 6 months to 12 months after administration, from 1 year to 2 years after administration, or for a period of time after administration that lasts up to the years in the individual's lifespan. In some cases, the period of time is at least one month following said administering, at least 6 months following said administering, at least 1 year following said administering, or at least 2 years following said administering. In some cases, the methods result in the reduction of the clinical presentation of SCD. In some cases, the methods result in the reduction in the frequency of the clinical presentation of SCD. In some cases, the methods result in the reduction in the severity of the clinical presentation of SCD. The methods may result in the elimination or prevention of the clinical presentation of SCD. The clinical presentation of SCD may include, e.g., pain crises requiring hospitalization, organ damage, kidney damage, pulmonary events (e.g., stroke), spleen damage, and anemia. In some cases, the methods result in the reduction in the frequency of pain crises requiring hospitalization in a treated individual by 2% to 95% compared to the frequency in the individual before treatment or in an untreated individual such as, e.g., by 5% to 90%, by 10% to 80%, by 20% to 70%, by 30% to 60%, or by 40% to 50%. In some cases, the methods result in the reduction in the severity of pain crises requiring hospitalization in a treated individual by 2% to 95% compared to the severity in the individual before treatment or in an untreated individual such as, e.g., by 5% to 90%, by 10% to 80%, by 20% to 70%, by 30% to 60%, or by 40% to 50%. In some cases, the methods result in the reduction in frequency of organ damage in a treated individual by 2% to 95% compared to the frequency in the individual before treatment or in an untreated individual such as, e.g., by 5% to 90%, by 10% to 80%, by 20% to 70%, by 30% to 60%, or by 40% to 50%. In some cases, the methods result in the reduction in the severity of organ damage in a treated individual by 2% to 95% compared to the severity in the individual before treatment or in an untreated individual such as, e.g., by 5% to 90%, by 10% to 80%, by 20% to 70%, by 30% to 60%, or by 40% to 50%. In some cases, the methods result in the reduction in the frequency of kidney damage in a treated individual by 2% to 95% compared to the frequency in the individual before treatment or in an untreated individual such as, e.g., by 5% to 90%, by 10% to 80%, by 20% to 70%, by 30% to 60%, or by 40% to 50%. In some cases, the methods result in the reduction in the severity of kidney damage in a treated individual by 2% to 95% compared to the severity in the individual before treatment or in an untreated individual such as, e.g., by 5% to 90%, by 10% to 80%, by 20% to 70%, by 30% to 60%, or by 40% to 50%. In some cases, the methods result in the reduction in the frequency of pulmonary events, e.g., stroke, in a treated individual by 2% to 95% compared to the frequency in the individual before treatment or in an untreated individual such as, e.g., by 5% to 90%, by 10% to 80%, by 20% to 70%, by 30% to 60%, or by 40% to 50%. In some cases, the methods result in the reduction in the severity of pulmonary events, e.g., stroke, in a treated individual by 2% to 95% compared to the severity in the individual before treatment or in an untreated individual such as, e.g., by 5% to 90%, by 10% to 80%, by 20% to 70%, by 30% to 60%, or by 40% to 50%. In some cases, the methods result in the reduction in frequency of symptoms of anemia in a treated individual by 2% to 95% compared to the frequency in the individual before treatment or in an untreated individual such as, e.g., by 5% to 90%, by 10% to 80%, by 20% to 70%, by 30% to 60%, or by 40% to 50%. In some cases, the methods result in the reduction in severity of symptoms of anemia in a treated individual by 2% to 95% compared to the severity in the individual before treatment or in an untreated individual such as, e.g., by 5% to 90%, by 10% to 80%, by 20% to 70%, by 30% to 60%, or by 40% to 50%. In some cases, the methods result in the reduction in the frequency of splenic complications or damage to the spleen, e.g., splenic sequestration, in a treated individual by 2% to 95% compared to the frequency in the individual before treatment or in an untreated individual such as, e.g., by 5% to 90%, by 10% to 80%, by 20% to 70%, by 30% to 60%, or by 40% to 50%. In some cases, the methods result in the reduction in the severity of splenic complications or damage to the spleen, e.g., splenic sequestration, in a treated individual by 2% to 95% compared to the severity in the individual before treatment or in an untreated individual such as, e.g., by 5% to 90%, by 10% to 80%, by 20% to 70%, by 30% to 60%, or by 40% to 50%. In some cases, the methods result in the reduction in hydroxyurea use by a treated individual by 2% to 95% compared to the hydroxyurea use in the individual before treatment or in an untreated individual such as, e.g., by 5% to 90%, by 10% to 80%, by 20% to 70%, by 30% to 60%, or by 40% to 50%. In some cases, the methods result in the reduction in the number of RBC transfusions to a treated individual by 2% to 95% compared to the number of transfusions to the individual before treatment or to an untreated individual such as, e.g., by 5% to 90%, by 10% to 80%, by 20% to 70%, by 30% to 60%, or by 40% to 50%. In some cases, the methods result in the increase in chance for survival of a treated individual by 2% to 95% compared to the chance for survival of the individual before treatment or of an untreated individual such as, e.g., by 5% to 90%, by 10% to 80%, by 20% to 70%, by 30% to 60%, or by 40% to 50%. In some cases, the methods result in the increase in years of survival of a treated individual by 1 year to 50 years compared to the years of survival for the individual before treatment or for an untreated individual such as, e.g., by 5 years to 40 years, by 10 years to 30 years or by 15 years to 20 years.

### Kits

[0166] Aspects of the present disclosure include a kit for treating sickle cell disease (SCD) in an individual. The kit may include A) a stem cell mobilization agent that provides for mobilization of hematopoietic stem cells; and B) a genome-editing composition comprising: a) a ribonucleoprotein (RNP) complex comprising: i) a class 2 CRISPR/Cas effector polypeptide, or a nucleic acid comprising a nucleotide sequence encoding the class 2 CRISPR/Cas effector polypeptide; and ii) a guide RNA; and b) a donor DNA template comprising a nucleotide sequence that provides for correction of an SCD-associated single nucleotide polymorphism in a globin gene.

[0167] Where desired, the kits may further include one or more additional components that find use in an application, e.g., reagents, buffers, etc. Any or all of the kit components may be present in sterile packaging, as desired. In some cases, one or more kit components may be present in a container, e.g., a sterile container, such as a syringe. In some cases, the stem cell mobilization agent is plerixafor. In some cases, the class 2 CRISPR/Cas effector polypeptide is a type II CRIPSR/Cas effector polypeptide, as described above. The guide RNA may include any suitable guide RNA, as described above. The donor DNA template can include any suitable donor DNA template, as described above.

[0168] In addition to the above-mentioned components, a subject kit may further include instructions for using the components of the kit, e.g., to practice the subject methods. The instructions may be recorded on a suitable recording medium. For example, the instructions may be printed on a substrate, such as paper or plastic, etc. As such, the instructions may be present in the kits as a package insert, in the labeling of the container of the kit or components thereof (i.e., associated with the packaging or subpackaging), etc. In other embodiments, the instructions are present as an electronic storage data file present on a suitable computer readable storage medium, e.g., a portable flash drive, CD-ROM, diskette, Hard Disk Drive (HDD) etc. In yet other embodiments, the actual instructions are not present in the kit, but means for obtaining the instructions from a remote source, e.g. via the internet, are provided. An example of this embodiment is a kit that includes a web address where the instructions can be viewed and/or from which the instructions can be downloaded. As with the instructions, the means for obtaining the instructions is recorded on a suitable substrate.

### Examples of Non-Limiting Aspects of the Disclosure

[0169] Aspects, including embodiments, of the present subject matter described above may be beneficial alone or in combination, with one or more other aspects or embodiments. Without limiting the foregoing description, certain non-limiting aspects of the disclosure numbered 1-56 are provided below. As will be apparent to those of skill in the art upon reading this disclosure, each of the individually numbered aspects may be used or combined with any of the preceding or following individually numbered aspects. This is intended to provide support for all such combinations of aspects and is not limited to combinations of aspects explicitly provided below:

[0170] Aspect 1. A method of modifying a globin gene in the genome of a hematopoietic stem/progenitor cell (HSPC), the method comprising:

[0171] A) obtaining HSPCs from an individual having a globin gene comprising a sickle cell disease (SCD)-associated single-nucleotide polymorphism (SNP), wherein said obtaining comprises:
[0172] a) administering to the individual an amount of a stem cell mobilization agent effective to mobilize CD34⁺ HSPCs; and
[0173] b) collecting the mobilized CD34⁺ HSPCs from the individual, thereby generating an in vitro population of CD34⁺ HSPCs;

[0174] B) contacting the in vitro population of CD34⁺ HSPCs with a genome editing composition comprising:
[0175] a) a ribonucleoprotein (RNP) complex comprising:
   [0176] i) a class 2 CRISPR/Cas effector polypeptide, or a nucleic acid comprising a nucleotide sequence encoding the class 2 CRISPR/Cas effector polypeptide; and
   [0177] ii) a guide RNA; and
[0178] b) a donor DNA template comprising a nucleotide sequence that provides for correction of the SCD-associated SNP in the globin gene,

[0179] thereby generating an in vitro mixed population, wherein at least 2% of the SCD-associated SNPs are corrected in the in vitro mixed population.

[0180] Aspect 2. The method of aspect 1, wherein the class 2 CRISPR/Cas effector polypeptide is a type II CRISPR/Cas effector polypeptide.

[0181] Aspect 3. The method of aspect 2, wherein the class 2 CRISPR/Cas effector polypeptide is a Cas9 protein and the corresponding CRISPR/Cas guide RNA is a Cas9 guide RNA.

[0182] Aspect 4. The method of aspect 1, wherein the class 2 CRISPR/Cas effector polypeptide is a type V or type VI CRISPR/Cas effector polypeptide.

[0183] Aspect 5. The method of aspect 4, wherein the class 2 CRISPR/Cas effector polypeptide is a Cpf1 protein, a C2c1 protein, a C2c3 protein, or a C2c2 protein.

[0184] Aspect 6. The method of aspect 4, wherein the class 2 CRISPR/Cas effector polypeptide is a Cas12 enzyme.

[0185] Aspect 7. The method of aspect 4, wherein the class 2 CRISPR/Cas effector polypeptide is a Cas13 enzyme.

[0186] Aspect 8. The method of aspect 1, wherein the class 2 CRISPR/Cas effector polypeptide is a high-fidelity variant.

[0187] Aspect 9. The method of any one of aspects 1-8, wherein the guide RNA comprises one or more nucleic acid modifications.

[0188] Aspect 10. The method of aspect 9, wherein the first three nucleotides at the 5′ end of the guide RNA comprise nucleic acid modifications.

[0189] Aspect 11. The method of aspect 10, wherein the nucleic acid modifications comprise one or more of a modified nucleobase, a modified backbone or non-natural internucleoside linkage, a modified sugar moiety, a Locked Nucleic Acid, and a Peptide Nucleic acid.

[0190] Aspect 12. The method of any one of aspects 1-11, wherein the stem cell mobilization agent is plerixafor.

[0191] Aspect 13. The method of any one of aspects 1-12, wherein the SCD-associated SNP is an A-to-T substitution at position 170 of the nucleotide sequence depicted in FIG. 15.

[0192] Aspect 14. The method of any one of aspects 1-13, wherein the donor DNA template comprises the nucleotide sequence

(SEQ ID NO: 1126)
5′-tcagggcagagccatctattgcttacaTTTGCTTCTGACACAACTGTG
TTCACTAGCAACCTCAAACAGACACCATGGTGCACCTGACTCCTgaaGAGA
AGTCTGCGGTTACTGCCCTGTGGGGCAAGGTGAACGTGGATGAAGTTGGTG
GTGAGGCCCTGGGCAGGT-3′.

[0193] Aspect 15. The method of any one of aspects 1-14, wherein the guide RNA targeting segment comprises the nucleotide sequence 5′-CUUGCCCCACAGGGCAGUAA-3′ (SEQ ID NO: 1128).

[0194] Aspect 16. The method of any one of aspects 1-15, wherein 2% to 50% of the SCD-associated SNPs in the in vitro mixed population have been corrected.

[0195] Aspect 17. The method of aspect 16, wherein 35% of the SCD-associated SNPs in the in vitro mixed population have been corrected.

[0196] Aspect 18. The method of any one of aspects 1-17, wherein from 2% to 25% of the SCD-associated SNPs in the in vitro mixed population have been corrected.

[0197] Aspect 19. The method of any one of aspects 1-18, wherein from 2% to 20% of cells of the in vitro mixed population comprise only one corrected SCD-associated SNP.

[0198] Aspect 20. The method of any one of aspects 1-18, wherein from 2% to 20% of cells of the in vitro mixed population comprise two corrected SCD-associated SNPs.

[0199] Aspect 21. A method of treating sickle cell disease (SCD) in an individual, the method comprising:

[0200] a) modifying a globin gene in the genome of a hematopoietic stem/progenitor cell (HSPC) obtained from the individual according to the method of any one of aspects 1-20, thereby generating an in vitro mixed population, wherein at least 2% of the SCD-associated SNPs are corrected in the in vitro mixed population; and

[0201] b) administering the in vitro mixed population to the individual, thereby treating the SCD in the individual.

[0202] Aspect 22. The method of aspect 21, wherein administering the mixed population produces an engrafted population comprising hematopoietic stem cells (HSCs).

[0203] Aspect 23. The method of aspect 22, wherein from 2% to 20% of HSCs in the engrafted population comprise at least one corrected SCD-associated SNP for a period of time of at least one month following said administering.

[0204] Aspect 24. The method of aspect 22, wherein from 2% to 20% of cells of the engrafted population comprise only one corrected SCD-associated SNP for a period of time of at least one month following said administering.

[0205] Aspect 25. The method of aspect 22, wherein 2% to 20% of cells of the engrafted population retain two corrected SCD-associated SNPs for a period of time of at least one month following said administering.

[0206] Aspect 26. The method of any one of aspects 22-25, wherein 2% to 50% of the SCD-associated SNPs are corrected for a period of time of at least one month following said administering.

[0207] Aspect 27. The method of aspect 26, wherein 20% of the SCD-associated SNPs are corrected for a period of time of at least one month following said administering.

[0208] Aspect 28. The method of any one of aspects 22-27, wherein at least 40% of circulating red blood cells in the individual comprise HbA for a period of time of at least one month following said administering.

[0209] Aspect 29. The method of aspect 28, wherein 2% to 95% of circulating RBCs have a wild type morphology for a period of time of at least one month following said administering.

[0210] Aspect 30. The method of any one of aspects 21-29, wherein the method comprises administering 10⁶ to 10⁷ cells from the in vitro mixed population per kilogram of body weight of the individual.

[0211] Aspect 31. The method of any one of aspects 21-30, wherein the guide RNA comprises one or more nucleic acid modifications.

[0212] Aspect 32. The method of aspect 31, wherein the first three nucleotides at the 5′ end of the guide RNA comprise nucleic acid modifications.

[0213] Aspect 33. The method of aspect 32, wherein the nucleic acid modifications comprise one or more of a modified nucleobase, a modified backbone or non-natural internucleoside linkage, a modified sugar moiety, a Locked Nucleic Acid, and a Peptide Nucleic acid.

[0214] Aspect 34. The method of any one of aspects 21-33, wherein said administering provides for production of hemoglobin A (HbA) in the individual.

[0215] Aspect 35. The method of aspect 34, wherein said administering provides for a ratio of HbA to hemoglobin S (HbS) in the individual of at least 0.1:1.0.

[0216] Aspect 36. The method of aspect 34, wherein said administering provides for a ratio of HbA to HbS in the individual of at least 0.25:1.0.

[0217] Aspect 37. The method of any one of aspects 21-36, wherein said administering provides for production of hemoglobin F (HbF) in the individual.

[0218] Aspect 38. The method of any one of aspects 21-37, wherein said administering provides for an amount of HbS that is less than 50% of the total hemoglobin in serum.

[0219] Aspect 39. The method of aspect any one of aspects 21-38, wherein said administering provides for an amount of HbA and HbF that is at least 40% of the total hemoglobin in serum.

[0220] Aspect 40. The method of any one of aspects 21-39, wherein said administering provides for an amount of HbA and HbF that is at least 50% of the total hemoglobin in serum.

[0221] Aspect 41. The method of any one of aspects 21-40, wherein said administering provides for an amount of HbA and HbF that is at least 60% of the total hemoglobin in serum.

[0222] Aspect 42. A kit for treating sickle cell disease (SCD) in an individual, the kit comprising:

[0223] A) a stem cell mobilization agent that provides for mobilization of hematopoietic stem cells; and

[0224] B) a genome-editing composition comprising:
[0225] a) a ribonucleoprotein (RNP) complex comprising:
   [0226] i) a class 2 CRISPR/Cas effector polypeptide, or a nucleic acid comprising a nucleotide sequence encoding the class 2 CRISPR/Cas effector polypeptide; and
   [0227] ii) a guide RNA; and
[0228] b) a donor DNA template comprising a nucleotide sequence that provides for correction of an SCD-associated single nucleotide polymorphism in a globin gene.

[0229] Aspect 43. The kit of aspect 42, wherein the stem cell mobilization agent is plerixafor.

[0230] Aspect 44. The kit of aspect 42 or 43, wherein the class 2 CRISPR/Cas effector polypeptide is a type II CRISPR/Cas effector polypeptide.

[0231] Aspect 45. The kit of aspect 44, wherein the class 2 CRISPR/Cas effector polypeptide is a Cas9 protein and the corresponding CRISPR/Cas guide RNA is a Cas9 guide RNA.

[0232] Aspect 46. The kit of aspect 42 or 43, wherein the class 2 CRISPR/Cas effector polypeptide is a type V or type VI CRISPR/Cas effector polypeptide.

[0233] Aspect 47. The kit of aspect 46, wherein the class 2 CRISPR/Cas effector polypeptide is a Cpf1 protein, a C2c1 protein, a C2c3 protein, or a C2c2 protein.

[0234] Aspect 48. The kit of aspect 46, wherein the class 2 CRISPR/Cas effector polypeptide is a Cas12 enzyme.

[0235] Aspect 49. The kit of aspect 46, wherein the class 2 CRISPR/Cas effector polypeptide is a Cas13 enzyme.

[0236] Aspect 50. The kit of aspect 42, wherein the class 2 CRISPR/Cas effector polypeptide is a high-fidelity variant.

[0237] Aspect 51. The kit of any one of aspects 42-50, wherein the guide RNA comprises one or more nucleic acid modifications.

[0238] Aspect 52. The kit of aspect 51, wherein the first three nucleotides at the 5′ end of the guide RNA comprise nucleic acid modifications.

[0239] Aspect 53. The kit of aspect 52, wherein the nucleic acid modifications comprise one or more of a modified nucleobase, a modified backbone or non-natural internucleoside linkage, a modified sugar moiety, a Locked Nucleic Acid, and a Peptide Nucleic acid.

[0240] Aspect 54. The kit of any one of aspects 42-53, wherein the SCD-associated SNP is an A-to-T substitution at position 170 of the nucleotide sequence depicted in FIG. 15.

[0241] Aspect 55. The kit of any one of aspects 42-54, wherein the donor DNA template comprises the nucleotide sequence

(SEQ ID NO: 1126)
5′-tcagggcagagccatctattgcttacaTTTGCTTCTGACACAACTGTG
TTCACTAGCAACCTCAAACAGACACCATGGTGCACCTGACTCCTgaaGAGA
AGTCTGCGGTTACTGCCCTGTGGGGCAAGGTGAACGTGGATGAAGTTGGTG
GTGAGGCCCTGGGCAGGT-3′.

[0242] Aspect 56. The kit of any one of aspects 42-55, wherein the guide RNA targeting segment comprises the nucleotide sequence 5′-CUUGCCCCACAGGGCAGUAA-3′ (SEQ ID NO: 1128).

### EXAMPLES

[0243] The following examples are put forth so as to provide those of ordinary skill in the art with a complete disclosure and description of how to make and use the present invention, and are not intended to limit the scope of what the inventors regard as their invention nor are they intended to represent that the experiments below are all or the only experiments performed. Efforts have been made to ensure accuracy with respect to numbers used (e.g. amounts, temperature, etc.) but some experimental errors and deviations should be accounted for. Unless indicated otherwise, parts are parts by weight, molecular weight is weight average molecular weight, temperature is in degrees Celsius, and pressure is at or near atmospheric. Standard abbreviations may be used, e.g., bp, base pair(s); kb, kilobase(s); pl, picoliter(s); s or sec, second(s); min, minute(s); h or hr, hour(s); aa, amino acid(s); kb, kilobase(s); bp, base pair(s); nt, nucleotide(s); i.m., intramuscular(ly); i.p., intraperitoneal(ly); s.c., subcutaneous(ly); and the like.

### Example 1

[0244] FIG. 1 shows the use of Cas9 ribonucleoprotein and short ssDNA HDR donor to genetically edit human cells. Cas9 RNP was assembled by mixing in vitro, along with a ssDNA donor with the desired mutation, and delivered to human cells by electroporation. In the example provided, this process can convert a blue fluorescent protein (BFP)-encoding gene to a green fluorescent protein (GFP)-encoding gene with 25% efficiency with no selection.

[0245] FIG. 2 shows an outline of a method of targeting the sickle mutation in CD34⁺ HSPCs. The targeted region of the adult ß-globin gene with the sickle SNP is shown. The gene is targeted with a guide, G10 which binds to the indicated region, making a double-strand break at the cut site indicated. The ssDNA HDR donor CJ6A, which matches the sense strand (indicated) is incorporated into the cut genomic DNA, introducing a corrected “wild-type” sequence, along with mutations that prevent binding of G10 to the target gene, resulting in gene correction from SCD to wild-type.

[0246] FIG. 3 illustrates consequences of gene correction on CD34⁺ HSPCs. Three samples were electroporated into CD34⁺ HSPCs with the reagents described above, leading to 15-20% correction. When this mixture of corrected cells was differentiated into red blood cells, they expressed reduced sickle hemoglobin (HbS), and increased wild-type adult hemoglobin (HbA) and fetal hemoglobin (HbF).

[0247] FIG. 4 shows optimization of reagents and techniques. Different electroporation codes led to different levels of HDR at the SCD SNP. ER100 code on the Lonza 4d electroporator was used. Synthetic RNAs worked well for correction, and the “3×MS” protection (indicated) was also used.

[0248] FIG. 5 shows the determination of the optimal dose of the RNP (with the 3×MS-protected G10 guide) and ssDNA donor (ssODN). The RNP was optimal in terms of HDR at 75 pmol per 100,000 cells (in a 20 μL electroporation volume), and the ssODN was optimal at 100 pmol.

[0249] FIG. 9 shows properties of CD34⁺ HSPC collected from Plerixafor mobilization as described above. These cells were almost entirely CD34⁺, and there was an absence of undesired T cells. Analysis by flow cytometry indicated the presence of long-term engrafting stem cells (LT-HSC) in the mixture. Correction of these cells was robust, with 35% correction in two in vitro tests, better than for other sources of cells. These cells formed colonies in soft agar with cytokines (CFU assay), indicating healthy cells after correction.

[0250] FIG. 10 shows HPLC trace of corrected HSPC mobilized with Plerixafor after differentiation into erythrocytes. These cells expressed 77% non-sickle hemoglobin (compared to <5% for untreated cells) by this technique.

[0251] FIG. 11 shows RNAseq analysis of globin mRNA expression of the same cells as in FIG. 8. These cells expressed 55% non-sickle globin.

[0252] FIG. 12 provides a schematic illustrating an assay for determining the long-term engraftment potential of the corrected HSPC from Plerixafor mobilization of sickle cell disease patient. HSPC are corrected using the protocol optimized above in large batches. Corrected cell mixtures are cultured for one day and then a sample is removed to estimate correction by next-generation sequencing. The remaining cells are injected into NBSGW mice by tail vein injection (500,000 to 1 million cells per mouse). Mice are kept in cages for 4 months as corrected cells engraft in the bone marrow. After sacrifice, correction of human cells in the bone marrow is estimated by next-generation sequencing. For some mice, CD34⁺ cells are sorted out, and analyzed for engraftment and differentiation potential by the CFU assay, and differentiation into erythrocytes with characterization by HPLC and RNAseq.

[0253] FIG. 13 provides characteristics of corrected HSCs after engraftment for 4 months in the NBSGW mice. Correction averaged 22% in the bone marrow, 24% in the spleen, and 20% in the CD34⁺ cells sorted from the marrow by FACS. NHEJ was high in all compartments, >65% (meaning that the sickle allele was greatly reduced to about 15%). Engraftment of human cells in the bone marrow averaged 45%.

[0254] FIG. 14 shows reduction of off-target activity using IDT HiFi Cas9 mutant #1. This variant of Cas9 had mutation at the on-target site equal to wild-type Cas9, and had greatly reduced mutation at off-target sites OT1 and OT2, compared to wild-type Cas9. Other variants (espCas9 1.1) exhibited poor mutation at the on-target site. Viability of the edited HSPC after treatment with the HiFi Cas9 mutant 1 was high, ˜80%.

[0255] FIG. 18 depicts electroporation of harvested cells, and storage and use of the electroporated cells. 10 million cells from 2 different healthy people were electroporated using a maxcyte instrument with: 3.3 μM Cas9 protein, 3.96 μM G10-3×MS sgRNA in MaxCYte electroporation buffer at a volume of 100 μL, with power setting 7. Cells are cultured for 24 hours after electroporation before freezing in controlled-rate freezer. This is small-scale version of a protocol for clinical-scale production of gene-corrected cells. The frozen cells were thawed, cultured for 5 days and genotyped by next-generation sequencing (NGS), with HDR at the SCD SNP as indicated. Cells were viable and healthy, as indicated.

[0256] While the present invention has been described with reference to the specific embodiments thereof, it should be understood by those skilled in the art that various changes may be made and equivalents may be substituted without departing from the true spirit and scope of the invention. In addition, many modifications may be made to adapt a particular situation, material, composition of matter, process, process step or steps, to the objective, spirit and scope of the present invention. All such modifications are intended to be within the scope of the claims appended hereto.

The application's sequence listing, which the Patent Office published only in electronic form, follows.

SEQUENCE LISTING (1128 sequences)

SEQ ID NO: 1 - protein, 15 aa, Artificial sequence
  Synthetic Sequence
IGLDIGTNSVGWAVI

SEQ ID NO: 2 - protein, 8 aa, Artificial sequence
  Synthetic Sequence
IVIEMARE

SEQ ID NO: 3 - protein, 27 aa, Artificial sequence
  Synthetic Sequence
DVDHIVPQSFLKDDSIDNKVLTRSDKN

SEQ ID NO: 4 - protein, 8 aa, Artificial sequence
  Synthetic Sequence
HHAHDAYL

SEQ ID NO: 5 - protein, 1368 aa, Streptococcus pyogenes [sequence omitted]

SEQ ID NO: 6 - protein, 1367 aa, Streptococcus pyogenes
MDKKYSIGLDIGTNSVGWAVITDDYKVPSKKLKVLGNTDRHGIKKNLIGALLFDSGETAEATRLKRTARRRYTRRKNRICYLQEIFSNEMAKVDDSFFHRLEESFLVEEDKKHERHPIFGNIVDEVAYHEKYPTIYHLRKKLADSTDKVDLRLIYLALAHMIKFRGHFLIEGDLNPDNSDVDKLFIQLVQTYNQLFEENPINASRVDAKAILSARLSKSRRLENLIAQLPGEKKNGLFGNLIALSLGLTPNFKSNFDLAEDAKLQLSKDTYDDDLDNLLAQIGDQYADLFLAAKNLSDAILLSDILRVNSEITKAPLSASMIKRYDEHHQDLTLLKALVRQQLPEKYKEIFFDQSKNGYAGYIDGGASQEEFYKFIKPILEKMDGTEELLAKLNREDLLRKQRTFDNGSIPYQIHLGELHAILRRQEDFYPFLKDNREKIEKILTFRIPYYVGPLARGNSRFAWMTRKSEETITPWNFEEVVDKGASAQSFIERMTNFDKNLPNEKVLPKHSLLYEYFTVYNELTKVKYVTEGMRKPAFLSGEQKKAIVDLLFKTNRKVTVKQLKEDYFKKIECFDSVEISGVEDRFNTSLGTYHDLLKIIKDKDFLDNEENEDILEDIVLTLTLFEDKEMIEERLKKYANLFDDKVMKQLKRRHYTGWGRLSRKLINGIRDKQSGKTILDFLKSDGFANRNFMQLINDDSLTFKEAIQKAQVSGQGHSLHEQIANLAGSPAIKKGILQTVKIVDELVKVMGHKPENIVIEMARENQTTQKGQKNSRERMKRIEEGIKELGSQILKEHPVENTQLQNEKLYLYYLQNGRDMYVDQELDINRLSDYDVDHIVPQSFLKDDSIDNKVLTRSDKNRGKSDNVPSEEVVKKMKNYWRQLLNAKLITQRKFDNLTKAERGGLSELDKAGFIKRQLVETRQITKHVAQILDSRMNTKYDENDKLIREVKVITLKSKLVSDFRKDFQFYKVREINNYHHAHDAYLNAVVGTALIKKYPKLESEFVYGDYKVYDVRKMIAKSEQEIGKATAKYFFYSNIMNFFKTEITLANGEIRKRPLIETNGETGEIVWDKGRDFATVRKVLSMPQVNIVKKTEVQTGGFSKESILPKRNSDKLIARKKDWDPKKYGGFDSPTVAYSVLVVAKVEKGKSKKLKSVKELLGITIMERSSFEKNPIDFLEAKGYKEVRKDLIIKLPKYSLFELENGRKRMLASAGELQKGNELALPSKYVNFLYLASHYEKLKGSPEDNEQKQLFVEQHKHYLDEIIEQISEFSKRVILADANLDKVLSAYNKHRDKPIREQAKNIIHLFTLTNLGAPAAFKYFDTTIERNRYKSIKEVLDATLIHQSITGLYEIRIDLSQLGGD

SEQ ID NO: 7 - protein, 1056 aa, Pasteurella multocida
MQTTNLSYILGLDLGIASVGWAVVEINENEDPIGLIDVGVRIFERAEVPKTGESLALSRRLARSTRRLIRRRAHRLLLAKRFLKREGILSTIDLEKGLPNQAWELRVAGLERRLSAIEWGAVLLHLIKHRGYLSKRKNESQTNNKELGALLSGVAQNHQLLQSDDYRTPAELALKKFAKEEGHIRNQRGAYTHTFNRLDLLAELNLLFAQQHQFGNPHCKEHIQQYMTELLMWQKPALSGEAILKMLGKCTHEKNEFKAAKHTYSAERFVWLTKLNNLRILEDGAERALNEEERQLLINHPYEKSKLTYAQVRKLLGLSEQAIFKHLRYSKENAESATFMELKAWHAIRKALENQGLKDTWQDLAKKPDLLDEIGTAFSLYKTDEDIQQYLTNKVPNSVINALLVSLNFDKFIELSLKSLRKILPLMEQGKRYDQACREIYGHHYGEANQKTSQLLPAIPAQEIRNPVVLRTLSQARKVINAIIRQYGSPARVHIETGRELGKSFKERREIQKQQEDNRTKRESAVQKFKELFSDFSSEPKSKDILKFRLYEQQHGKCLYSGKEINIHRLNEKGYVEIDHALPFSRTWDDSFNNKVLVLASENQNKGNQTPYEWLQGKINSERWKNFVALVLGSQCSAAKKQRLLTQVIDDNKFIDRNLNDTRYIARFLSNYIQENLLLVGKNKKNVFTPNGQITALLRSRWGLIKARENNNRHHALDAIVVACATPSMQQKITRFIRFKEVHPYKIENRYEMVDQESGEIISPHFPEPWAYFRQEVNIRVFDNHPDTVLKEMLPDRPQANHQFVQPLFVSRAPTRKMSGQGHMETIKSAKRLAEGISVLRIPLTQLKPNLLENMVNKEREPALYAGLKARLAEFNQDPAKAFATPFYKQGGQQVKAIRVEQVQKSGVLVRENNGVADNASIVRTDVFIKNNKFFLVPIYTWQVAKGILPNKAIVAHKNEDEWEEMDEGAKFKFSLFPNDLVELKTKKEYFFGYYIGLDRATGNISLKEHDGEISKGKDGVYRVGVKLALSFEKYQVDELGKNRQICRPQQRQPVR

SEQ ID NO: 8 - protein, 1368 aa, Streptococcus pyogenes
MDKKYSIGLDIGTNSVGWAVITDDYKVPSKKLKGLGNTDRHGIKKNLIGALLFDSGETAEATRLKRTARRRYTRRKNRICYLQEIFSNEMAKVDDSFFHRLEESFLVEEDKKHERHPIFGNIVDEVAYHEKYPTIYHLRKKLADSTDKVDLRLIYLALAHMIKFRGHFLIEGDLNPDNSDVDKLFIQLVQTYNQLFEENPINASRVDAKAILSARLSKSRRLENLIAQLPGEKKNGLFGNLIALSLGLTPNFKSNFDLAEDAKLQLSKDTYDDDLDNLLAQIGDQYADLFLAAKNLSDATLLSDILRVNSEITKAPLSASMIKRYDEHHQDLTLLKALVRQQLPEKYKEIFFDQSKNGYAGYIDGGASQEEFYKFIKPILEKMDGTEELLAKLNREDLLRKQRTFDNGSIPYQIHLGELHAILRRQEDFYPFLKDNREKIEKILTFRIPYYVGPLARGNSRFAWMTRKSEETITPWNFEEVVDKGASAQSFIERMTNFDKNLPNEKVLPKHSLLYEYFTVYNELTKVKYVTEGMRKPAFLSGEQKKAIVDLLFKTNRKVTVKQLKEDYFKKIECFDSVEISGVEDRFNASLGTYHDLLKIIKDKDFLDNEENEDILEDIVLTLTLFEDREMIEERLKTYAHLFDDKVMKQLKRRRYTGWGRLSRKLINGIRDKQSGKTILDFLKSDGFANRNFMQLIHDDSLTFKEDIQKAQVSGQGDSLHEHIANLAGSPAIKKGILQTVKVVDELVKVMGRHKPENIVIEMARENQTTQKGQKNSRERMKRIEEGIKELGSDILKEYPVENTQLQNEKLYLYYLQNGRDMYVDQELDINRLSDYDVDHIVPQSFLKDDSIDNKVLTRSDKNRGKSDNVPSEEVVKKMKNYWRQLLNAKLITQRKFDNLTKAERGGLSELDKVGFIKRQLVETRQITKHVAQILDSRMNTKYDENDKLIREVRVITLKSKLVSDFRKDFQFYKVREINNYHHAHDAYLNAVVGTALIKKYPKLESEFVYGDYKVYDVRKMIAKSEQEIGKATAKYFFYSNIMNFFKTEITLANGEIRKRPLIETNGETGEIVWDKGRDFATVRKVLSMPQVNIVKKTEVQTGGFSKESILPKRNSDKLIARKKDWDPKKYGGFDSPTVAYSVLVVAKVEKGKSKKLKSVKELLGITIMERSSFEKDPIDFLEAKGYKEVRKDLIIKLPKYSLFELENGRKRMLASAGELQKGNELALPSKYVNFLYLASHYEKLKGSPEDNEQKQLFVEQHKHYLDEIIEQISEFSKRVILADANLDKVLSAYNKHRDKPIREQAENIIHLFTLTNLGAPAAFKYFDTTIDRKRYTSTKEVLDATLIHQSITGLYETRIDLSQLGGD

SEQ ID NO: 9 - protein, 1334 aa, Listeria innocua
MKKPYTIGLDIGTNSVGWAVLTDQYDLVKRKMKIAGDSEKKQIKKNFWGVRLFDEGQTAADRRMARTARRRIERRRNRISYLQGIFAEEMSKTDANFFCRLSDSFYVDNEKRNSRHPFFATIEEEVEYHKNYPTIYHLREELVNSSEKADLRLVYLALAHIIKYRGNFLIEGALDTQNTSVDGIYKQFIQTYNQVFASGIEDGSLKKLEDNKDVAKILVEKVTRKEKLERILKLYPGEKSAGMFAQFISLIVGSKGNFQKPFDLIEKSDIECAKDSYEEDLESLLALIGDEYAELFVAAKNAYSAVVLSSIITVAETETNAKLSASMIERFDTHEEDLGELKAFIKLHLPKHYEEIFSNTEKHGYAGYIDGKTKQADFYKYMKMTLENIEGADYFIAKIEKENFLRKQRTFDNGAIPHQLHLEELEAILHQQAKYYPFLKENYDKIKSLVTFRIPYFVGPLANGQSEFAWLTRKADGEIRPWNIEEKVDFGKSAVDFIEKMTNKDTYLPKENVLPKHSLCYQKYLVYNELTKVRYINDQGKTSYFSGQEKEQIFNDLFKQKRKVKKKDLELFLRNMSHVESPTIEGLEDSFNSSYSTYHDLLKVGIKQEILDNPVNTEMLENIVKILTVFEDKRMIKEQLQQFSDVLDGVVLKKLERRHYTGWGRLSAKLLMGIRDKQSHLTILDYLMNDDGLNRNLMQLINDSNLSFKSIIEKEQVTTADKDIQSIVADLAGSPAIKKGILQSLKIVDELVSVMGYPPQTIVVEMARENQTTGKGKNNSRPRYKSLEKAIKEFGSQILKEHPTDNQELRNNRLYLYYLQNGKDMYTGQDLDIHNLSNYDIDHIVPQSFITDNSIDNLVLTSSAGNREKGDDVPPLEIVRKRKVFWEKLYQGNLMSKRKFDYLTKAERGGLTEADKARFIHRQLVETRQITKNVANILHQRFNYEKDDHGNTMKQVRIVTLKSALVSQFRKQFQLYKVRDVNDYHHAHDAYLNGVVANTLLKVYPQLEPEFVYGDYHQFDWFKANKATAKKQFYTNIMLFFAQKDRIIDENGEILWDKKYLDTVKKVMSYRQMNIVKKTEIQKGEFSKATIKPKGNSSKLIPRKTNWDPMKYGGLDSPNMAYAVVIEYAKGKNKLVFEKKIIRVTIMERKAFEKDEKAFLEEQGYRQPKVLAKLPKYTLYECEEGRRRMLASANEAQKGNQQVLPNHLVTLLHHAANCEVSDGKSLDYIESNREMFAELLAHVSEFAKRYTLAEANLNKINQLFEQNKEGDIKAIAQSFVDLMAFNAMGAPASFKFFETTIERKRYNNLKELLNSTIIYQSITGLYESRKRLDD

SEQ ID NO: 10 - protein, 1368 aa, Streptococcus pyogenes; identical to SEQ ID NO: 8

SEQ ID NO: 11 - protein, 1370 aa, Streptococcus agalactiae
MNKPYSIGLDIGTNSVGWSIITDDYKVPAKKMRVLGNTDKEYIKKNLIGALLFDGGNTAADRRLKRTARRRYTRRRNRILYLQEIFAEEMSKVDDSFFHRLEDSFLVEEDKRGSKYPIFATLQEEKDYHEKFSTIYHLRKELADKKEKADLRLIYIALAHIIKFRGHFLIEDDSFDVRNTDISKQYQDFLEIFNTTFENNDLLSQNVDVEAILTDKISKSAKKDRILAQYPNQKSTGIFAEFLKLIVGNQADFKKYFNLEDKTPLQFAKDSYDEDLENLLGQIGDEFADLFSAAKKLYDSVLLSGILTVIDLSTKAPLSASMIQRYDEHREDLKQLKQFVKASLPEKYQEIFADSSKDGYAGYIEGKTNQEAFYKYLSKLLTKQEDSENFLEKIKNEDFLRKQRTFDNGSIPHQVHLTELKAIIRRQSEYYPFLKENQDRIEKILTFRIPYYIGPLAREKSDFAWMTRKTDDSIRPWNFEDLVDKEKSAEAFIHRMTNNDFYLPEEKVLPKHSLIYEKFTVYNELTKVRYKNEQGETYFFDSNIKQEIFDGVFKEHRKVSKKKLLDFLAKEYEEFRIVDVIGLDKENKAFNASLGTYHDLEKILDKDFLDNPDNESILEDIVQTLTLFEDREMIKKRLENYKDLFTESQLKKLYRRHYTGWGRLSAKLINGIRDKESQKTILDYLIDDGRSNRNFMQLINDDGLSFKSIISKAQAGSHSDNLKEVVGELAGSPAIKKGILQSLKIVDELVKVMGYEPEQIVVEMARENQTTNQGRRNSRQRYKLLDDGVKNLASDLNGNILKEYPTDNQALQNERLFLYYLQNGRDMYTGEALDIDNLSQYDIDHIIPQAFIKDDSIDNRVLVSSAKNRGKSDDVPSLEIVKDCKVFWKKLLDAKLMSQRKYDNLTKAERGGLTSDDKARFIQRQLVETRQITKHVARILDERFNNELDSKGRRIRKVKIVTLKSNLVSNFRKEFGFYKIREVNNYHHAHDAYLNAVVAKAILTKYPQLEPEFVYGDYPKYNSYKTRKSATEKLFFYSNIMNFFKTKVTLADGTVVVKDDIEVNNDTGEIVWDKKKHFATVRKVLSYPQNNIVKKTEIQTGGFSKESILAHGNSDKLIPRKTKDIYLDPKKYGGFDSPIVAYSVLVVADIKKGKAQKLKTVTELLGITIMERSRFEKNPSAFLESKGYLNIRADKLIILPKYSLFELENGRRRLLASAGELQKGNELALPTQFMKFLYLASRYNESKGKPEEIEKKQEFVNQHVSYFDDILQLINDFSKRVILADANLEKINKLYQDNKENISVDELANNIINLFTFTSLGAPAAFKFFDKIVDRKRYTSTKEVLNSTLIHQSITGLYETRIDLGKLGED

SEQ ID NO: 12 - protein, 1345 aa, Streptococcus mutans
MKKPYSIGLDIGTNSVGWAVVTDDYKVPAKKMKVLGNTDKSHIEKNLLGALLFDSGNTAEDRRLKRTARRRYTRRRNRILYLQEIFSEEMGKVDDSFFHRLEDSFLVTEDKRGERHPIFGNLEEEVKYHENFPTIYHLRQYLADNPEKVDLRLVYLALAHIIKFRGHFLIEGKFDTRNNDVQRLFQEFLAVYDNTFENSSLQEQNVQVEEILTDKISKSAKKDRVLKLFPNEKSNGRFAEFLKLIVGNQADFKKHFELEEKAPLQFSKDTYEEELEVLLAQIGDNYAELFLSAKKLYDSILLSGILTVTDVGTKAPLSASMIQRYNEHQMDLAQLKQFIRQKLSDKYNEVFSDVSKDGYAGYIDGKTNQEAFYKYLKGLLNKIEGSGYFLDKIEREDFLRKQRTFDNGSIPHQIHLQEMRAIIRRQAEFYPFLADNQDRIEKLLTFRIPYYVGPLARGKSDFAWLSRKSADKITPWNFDEIVDKESSAEAFINRMTNYDLYLPNQKVLPKHSLLYEKFTVYNELTKVKYKTEQGKTAFFDANMKQEIFDGVFKVYRKVTKDKLMDFLEKEFDEFRIVDLTGLDKENKVFNASYGTYHDLCKILDKDFLDNSKNEKILEDIVLTLTLFEDREMIRKRLENYSDLLTKEQVKKLERRHYTGWGRLSAELIHGIRNKESRKTILDYLIDDGNSNRNFMQLINDDALSFKEEIAKAQVIGETDNLNQVVSDIAGSPAIKKGILQSLKIVDELVKIMGHQPENIVVEMARENQFTNQGRRNSQQRLKGLTDSIKEFGSQILKEHPVENSQLQNDRLFLYYLQNGRDMYTGEELDIDYLSQYDIDHIIPQAFIKDNSIDNRVLTSSKENRGKSDDVPSKDVVRKMKSYWSKLLSAKLITQRKFDNLTKAERGGLTDDDKAGFIKRQLVETRQITKHVARILDERFNTETDENNKKIRQVKIVTLKSNLVSNFRKEFELYKVREINDYHHAHDAYLNAVIGKALLGVYPQLEPEFVYGDYPHFHGHKENKATAKKFFYSNIMNFFKKDDVRTDKNGEIIWKKDEHISNIKKVLSYPQVNIVKKVEEQTGGFSKESILPKGNSDKLIPRKTKKFYWDTKKYGGFDSPIVAYSILVIADIEKGKSKKLKTVKALVGVTIMEKMTFERDPVAFLERKGYRNVQEENIIKLPKYSLFKLENGRKRLLASARELQKGNEIVLPNHLGTLLYHAKNIHKVDEPKHLDYVDKHKDEFKELLDVVSNFSKKYTLAEGNLEKIKELYAQNNGEDLKELASSFINLLTFTAIGAPATFKFFDKNIDRKRYTSTTEILNATLIHQSITGLYETRIDLNKLGGD

SEQ ID NO: 13 - protein, 1377 aa, Streptococcus agalactiae
MNKPYSIGLDIGTNSVGWSIITDDYKVPAKKMRVLGNTDKEYIKKNLIGALLFDGGNTAADRRLKRTARRRYTRRRNRILYLQEIFAEEMSKVDDSFFHRLEDSFLVEEDKRGSKYPIFATMQEEKYYHEKFPTIYHLRKELADKKEKADLRLVYLALAHIIKFRGHFLIEDDRFDVRNTDIQKQYQAFLEIFDTTFENNHLLSQNVDVEAILTDKISKSAKKDRILAQYPNQKSTGIFAEFLKLIVGNQADFKKHFNLEDKTPLQFAKDSYDEDLENLLGQIGDEFADLFSVAKKLYDSVLLSGILTVTDLSTKAPLSASMIQRYDEHHEDLKHLKQFVKASLPENYREVFADSSKDGYAGYIEGKTNQEAFYKYLLKLLTKQEGSEYFLEKIKNEDFLRKQRTFDNGSIPHQVHLTELRAIIRRQSEYYPFLKENQDRIEKILTFRIPYYVGPLAREKSDFAWMTRKTDDSIRPWNFEDLVDKEKSAEAFIHRMTNNDLYLPEEKVLPKHSLIYEKFTVYNELTKVRFLAEGFKDFQFLNRKQKETIFNSLFKEKRKVTEKDIISFLNKVDGYEGIAIKGIEKQFNASLSTYHDLKKILGKDFLDNTDNELILEDIVQTLTLFEDREMIKKCLDIYKDFFTESQLKKLYRRHYTGWGRLSAKLINGIRNKENQKTILDYLIDDGSANRNFMQLINDDDLSFKPIIDKARTGSHSDNLKEVVGELAGSPAIKKGILQSLKIVDELVKVMGYEPEQIVVEMARENQTTAKGLSRSRQRLTTLRESLANLKSNILEEKKPKYVKDQVENHHLSDDRLFLYYLQNGRDMYTKKALDIDNLSQYDIDHIIPQAFIKDDSIDNRVLVSSAKNRGKSDDVPSIEIVKARKMFWKNLLDAKLMSQRKYDNLTKAERGGLTSDDKARFIQRQLVETRQITKHVARILDERFNNEVDNGKKICKVKIVTLKSNLVSNFRKEFGFYKIREVNDYHHAHDAYLNAVVAKAILTKYPQLEPEFVYGMYRQKKLSKIVHEDKEEKYSEATRKMFFYSNLMNMFKRVVRLADGSIVVRPVIETGRYMRKTAWDKKKHFATVRKVLSYPQNNIVKKTEIQTGGFSKESILAHGNSDKLIPRKTKDIYLDPKKYGGFDSPIVAYSVLVVADIKKGKAQKLKTVTELLGITIMERSRFEKNPSAFLESKGYLNIRDDKLMILPKYSLFELENGRRRLLASAGELQKGNELALPTQFMKFLYLASRYNESKGKPEEIEKKQEFVNQHVSYFDDILQLINDFSKRVILADANLEKINKLYQDNKENIPVDELANNIINLFTFTSLGAPAAFKFFDKIVDRKRYTSTKEVLNSTLIHQSITGLYETRIDLGKLGED

SEQ ID NO: 14 - protein, 131 aa, Helicobacter hepaticus
MRILGFDIGITSIGWAYVESNELKDCGVRIFTKAENPKNGDSLAAPRREARGARRRLARRKARLNAIKRLLCKEFELNLNDYLANDGELPKAYQTSKDTKSPYELYTAFHWIIFAFCSIASSLSNRQMLPI

SEQ ID NO: 15 - protein, 1059 aa, Wolinella succinogenes
MIERILGVDLGISSLGWAIVEYDKDDEAANRIIDCGVRLFTAAETPKKKESPNKARREARGIRRVLNRRRVRMNMIKKLFLRAGLIQDVDLDGEGGMFYSKANRADVWELRHDGLYRLLKGDELARVLIHIAKHRGYKFIGDDEADEESGKVKKAGVVLRQNFEAAGCRTVGEWLWRERGANGKKRNKHGDYEISIHRDLLVEEVEAIFVAQQEMRSTIATDALKAAYREIAFFVRPMQRIEKMVGHCTYFPEERRAPKSAPTAEKFIAISKFFSTVIIDNEGWEQKIIERKTLEELLDFAVSREKVEFRHLRKFLDLSDNEIFKGLHYKGKPKTAKKREATLFDPNEPTELEFDKVEAEKKAWISLRGAAKLREALGNEFYGRFVALGKHADEATKILTYYKDEGQKRRELTKLPLEAEMVERLVKIGFSDFLKLSLKAIRDILPAMESGARYDEAVLMLGVPHKEKSAILPPLNKTDIDILNPTVIRAFAQFRKVANALVRKYGAFDRVHFELAREINTKGEIEDIKESQRKNEKERKEAADWIAETSFQVPLTRKNILKKRLYIQQDGRCAYTGDVIELERLFDEGYCEIDHILPRSRSADDSFANKVLCLARANQQKTDRTPYEWFGHDAARWNAFETRTSAPSNRVRTGKGKIDRLLKKNFDENSEMAFKDRNLNDTRYMARAIKTYCEQYWVFKNSHTKAPVQVRSGKLTSVLRYQWGLESKDRESHTHHAVDAIIIAFSTQGMVQKLSEYYRFKETHREKERPKLAVPLANFRDAVEEATRIENTETVKEGVEVKRLLISRPPRARVTGQAHEQTAKPYPRIKQVKNKKKWRLAPIDEEKFESFKADRVASANQKNFYETSTIPRVDVYHKKGKFHLVPIYLHEMVLNELPNLSLGTNPEAMDENFFKFSIFKDDLISIQTQGTPKKPAKIIMGYFKNMHGANMVLSSINNSPCEGFTCTPVSMDKKHKDKCKLCPEENRIAGRCLQGFLDYWSQEGLRPPRKEFECDQGVKFALDVKKYQIDPLGYYYEVKQEKRLGTIPQMRSAKKLVKK

SEQ ID NO: 16 - protein, 1409 aa, Wolinella succinogenes
MLVSPISVDLGGKNTGFFSFTDSLDNSQSGTVIYDESFVLSQVGRRSKRHSKRNNLRNKLVKRLFLLILQEHHGLSIDVLPDEIRGLFNKRGYTYAGFELDEKKKDALESDTLKEFLSEKLQSIDRDSDVEDFLNQIASNAESFKDYKKGFEAVFASATHSPNKKLELKDELKSEYGENAKELLAGLRVTKEILDEFDKQENQGNLPRAKYFEELGEYIATNEKVKSFFDSNSLKLTDMTKLIGNISNYQLKELRRYFNDKEMEKGDIWIPNKLHKITERFVRSWHPKNDADRQRRAELMKDLKSKEIMELLTTTEPVMTIPPYDDMNNRGAVKCQTLRLNEEYLDKHLPNWRDIAKRLNHGKFNDDLADSTVKGYSEDSTLLHRLLDTSKEIDIYELRGKKPNELLVKTLGQSDANRLYGFAQNYYELIRQKVRAGIWVPVKNKDDSLNLEDNSNMLKRCNHNPPHKKNQIHNLVAGILGVKLDEAKFAEFEKELWSAKVGNKKLSAYCKNIEELRKTHGNTFKIDIEELRKKDPAELSKEEKAKLRLTDDVILNEWSQKIANFFDIDDKHRQRFNNLFSMAQLHTVIDTPRSGFSSTCKRCTAENRFRSETAFYNDETGEFHKKATATCQRLPADTQRPFSGKIERYIDKLGYELAKIKAKELEGMEAKEIKVPIILEQNAFEYEESLRKSKTGSNDRVINSKKDRDGKKLAKAKENAEDRLKDKDKRIKAFSSGICPYCGDTIGDDGEIDHILPRSHTLKIYGTVFNPEGNLIYVHQKCNQAKADSIYKLSDIKAGVSAQWIEEQVANIKGYKTFSVLSAEQQKAFRYALFLQNDNEAYKKVVDWLRTDQSARVNGTQKYLAKKIQEKLTKMLPNKHLSFEFILADATEVSELRRQYARQNPLLAKAEKQAPSSHAIDAVMAFVARYQKVFKDGTPPNADEVAKLAMLDSWNPASNEPLTKGLSTNQKIEKMIKSGDYGQKNMREVFGKSIFGENAIGERYKPIVVQEGGYYIGYPATVKKGYELKNCKVVTSKNDIAKLEKIIKNQDLISLKENQYIKIFSINKQTISELSNRYFNMNYKNLVERDKEIVGLLEFIVENCRYYTKKVDVKFAPKYIHETKYPFYDDWRRFDEAWRYLQENQNKTSSKDRFVIDKSSLNEYYQPDKNEYKLDVDTQPIWDDFCRWYFLDRYKTANDKKSIRIKARKTFSLLAESGVQGKVFRAKRKIPTGYAYQALPMDNNVIAGDYANILLEANSKTLSLVPKSGISIEKQLDKKLDVIKKTDVRGLAIDNNSFFNADFDTHGIRLIVENTSVKVGNFPISAIDKSAKRMIFRALFEKEKGKRKKKTTISFKESGPVQDYLKVFLKKIVKIQLRTDGSISNIVVRKNAADFTLSFRSEHIQKLLK

SEQ ID NO: 17 - protein, 1374 aa, Fusobacterium nucleatum
MKKQKFSDYYLGFDIGTNSVGWCVTDLDYNVLRFNKKDMWGSRLFDEAKTAAERRVQRNSRRRLKRRKWRLNLLEEIFSDEIMKIDSNFFRRLKESSLWLEDKNSKEKFTLFNDDNYKDYDFYKQYPTIFHLRDELIKNPEKKDIRLIYLALHSIFKSRGHFLFEGQNLKEIKNFETLYNNLISFLEDNGINKSIDKDNIEKLEKIICDSGKGLKDKEKEFKGIFNSDKQLVAIFKLSVGSSVSLNDLFDTDEYKKEEVEKEKISFREQIYEDDKPIYYSILGEKIELLDIAKSFYDFMVLNNILSDSNYISEAKVKLYEEHKKDLKNLKYIIRKYNKENYDKLFKDKNENNYPAYIGLNKEKDKKEVVEKSRLKIDDLIKVIKGYLPKPERIEEKDKTIFNEILNKIELKTILPKQRISDNGTLPYQIHEVELEKILENQSKYYDFLNYEENGVSTKDKLLKTFKFRIPYYVGPLNSYHKDKGGNSWIVRKEEGKILPWNFEQKVDIEKSAEEFIKRMTNKCTYLNGEDVIPKDSFLYSEYIILNELNKVQVNDEFLNEENKRKIIDELFKENKKVSEKKFKEYLLVNQIANRTVELKGIKDSFNSNYVSYIKFKDIFGEKLNLDIYKEISEKSILWKCLYGDDKKIFEKKIKNEYGDILNKDEIKKINSFKFNTWGRLSEKLLTGIEFINLETGECYSSVMEALRRTNYNLMELLSSKFTLQESIDNENKEMNEVSYRDLIEESYVSPSLKRAILQTLKIYEEIKKITGRVPKKVFIEMARGGDESMKNKKIPARQEQLKKLYDSCGNDIANFSIDIKEMKNSLSSYDNNSLRQKKLYLYYLQFGKCMYTGREIDLDRLLQNNDTYDIDHIYPRSKVIKDDSFDNLVLVLKNENAEKSNEYPVKKEIQEKMKSFWRFLKEKNFISDEKYKRLTGKDDFELRGFMARQLVNVRQTTKEVGKILQQIEPEIKIVYSKAEIASSFREMFDFIKVRELNDTHHAKDAYLNIVAGNVYNTKFTEKPYRYLQEIKENYDVKKIYNYDIKNAWDKENSLEIVKKNMEKNTVNITRFIKEEKGELFNLNPIKKGETSNEIISIKPKLYDGKDNKLNEKYGYYTSLKAAYFIYVEHEKKNKKVKTFERITRIDSTLIKNEKNLIKYLVSQKKLLNPKIIKKIYKEQTLIIDSYPYTFTGVDSNKKVELKNKKQLYLEKKYEQILKNALKFVEDNQGETEENYKFIYLKKRNNNEKNETIDAVKERYNIEFNEMYDKFLEKLSSKDYKNYINNKLYTNFLNSKEKFKKLKLWEKSLILREFLKIFNKNTYGKYEIKDSQTKEKLFSFPEDTGRIRLGQSSLGNNKELLEESVTGLFVKKIKL

SEQ ID NO: 18 - protein, 1084 aa, Corynebacterium diphtheriae
MKYHVGIDVGTFSVGLAAIEVDDAGMPIKTLSLVSHIHDSGLDPDEIKSAVTRLASSGIARRTRRLYRRKRRRLQQLDKFIQRQGWPVIELEDYSDPLYPWKVRAELAASYIADEKERGEKLSVALRHIARHRGWRNPYAKVSSLYLPDGPSDAFKAIREEIKRASGQPVPETATVGQMVTLCELGTLKLRGEGGVLSARLQQSDYAREIQEICRMQEIGQELYRKIIDVVFAAESPKGSASSRVGKDPLQPGKNRALKASDAFQRYRIAALIGNLRVRVDGEKRILSVEEKNLVFDHLVNLTPKKEPEWVTIAEILGIDRGQLIGTATMTDDGERAGARPPTHDTNRSIVNSRIAPLVDWWKTASALEQHAMVKALSNAEVDDFDSPEGAKVQAFFADLDDDVHAKLDSLHLPVGRAAYSEDTLVRLTRRMLSDGVDLYTARLQEFGIEPSWTPPTPRIGEPVGNPAVDRVLKTVSRWLESATKTWGAPERVIIEHVREGFVTEKRAREMDGDMRRRAARNAKLFQEMQEKLNVQGKPSRADLWRYQSVQRQNCQCAYCGSPITFSNSEMDHIVPRAGQGSTNTRENLVAVCHRCNQSKGNTPFAIWAKNTSIEGVSVKEAVERTRHWVTDTGMRSTDFKKFTKAVVERFQRATMDEEIDARSMESVAWMANELRSRVAQHFASHGTTVRVYRGSLTAEARRASGISGKLKFFDGVGKSRLDRRHHAIDAAVIAFTSDYVAETLAVRSNLKQSQAHRQEAPQWREFTGKDAEHRAAWRVWCQKMEKLSALLTEDLRDDRVVVMSNVRLRLGNGSAHKETIGKLSKVKLSSQLSVSDIDKASSEALWCALTREPGFDPKEGLPANPERHIRVNGTHVYAGDNIGLFPVSAGSIALRGGYAELGSSFHHARVYKITSGKKPAFAMLRVYTIDLLPYRNQDLFSVELKPQTMSMRQAEKKLRDALATGNAEYLGWLVVDDELVVDTSKIATDQVKAVEAELGTIRRWRVDGFFSPSKLRLRPLQMSKEGIKKESAPELSKIIDRPGWLPAVNKLFSDGNVTVVRRDSLGRVRLESTAHLPVTWKVQ

SEQ ID NO: 19 - protein, 1395 aa, Treponema denticola
MKKEIKDYFLGLDVGTGSVGWAVTDTDYKLLKANRKDLWGMRCFETAETAEVRRLHRGARRRIERRKKRIKLLQELFSQEIAKTDEGFFQRMKESPFYAEDKTILQENTLFNDKDFADKTYHKAYPTINHLIKAWIENKVKPDPRLLYLACHNIIKKRGHFLFEGDFDSENQFDTSIQALFEYLREDMEVDIDADSQKVKEILKDSSLKNSEKQSRLNKILGLKPSDKQKKAITNLISGNKINFADLYDNPDLKDAEKNSISFSKDDFDALSDDLASILGDSFELLLKAKAVYNCSVLSKVIGDEQYLSFAKVKIYEKHKTDLTKLKNVIKKHFPKDYKKVFGYNKNEKNNNNYSGYVGVCKTKSKKLIINNSVNQEDFYKFLKTILSAKSEIKEVNDILTEIETGTFLPKQISKSNAEIPYQLRKMELEKILSNAEKHFSFLKQKDEKGLSHSEKIIMLLTFKIPYYIGPINDNHKKFFPDRCWVVKKEKSPSGKTTPWNFFDHIDKEKTAEAFITSRTNFCTYLVGESVLPKSSLLYSEYTVLNEINNLQIIIDGKNICDIKLKQKIYEDLFKKYKKITQKQISTFIKHEGICNKTDEVIILGIDKECTSSLKSYIELKNIFGKQVDEISTKNMLEEIIRWATIYDEGEGKTILKTKIKAEYGKYCSDEQIKKILNLKFSGWGRLSRKFLETVTSEMPGFSEPVNIITAMRETQNNLMELLSSEFTFTENIKKINSGFEDAEKQFSYDGLVKPLFLSPSVKKMLWQTLKLVKEISHITQAPPKKIFIEMAKGAELEPARTKTRLKILQDLYNNCKNDADAFSSEIKDLSGKIENEDNLRLRSDKLYLYYTQLGKCMYCGKPIEIGHVFDTSNYDIDHIYPQSKIKDDSISNRVLVCSSCNKNKEDKYPLKSEIQSKQRGFWNFLQRNNFISLEKLNRLTRATPISDDETAKFIARQLVETRQATKVAAKVLEKMFPETKIVYSKAETVSMFRNKFDIVKCREINDFHHAHDAYLNIVVGNVYNTKFTNNPWNFIKEKRDNPKIADTYNYYKVFDYDVKRNNITAWEKGKTIITVKDMLKRNTPIYTRQAACKKGELFNQTIMKKGLGQHPLKKEGPFSNISKYGGYNKVSAAYYTLIEYEEKGNKIRSLETIPLYLVKDIQKDQDVLKSYLTDLLGKKEFKILVPKIKINSLLKINGFPCHITGKTNDSFLLRPAVQFCCSNNEVLYFKKIIRFSEIRSQREKIGKTISPYEDLSFRSYIKENLWKKTKNDEIGEKEFYDLLQKKNLEIYDMLLTKHKDTIYKKRPNSATIDILVKGKEKFKSLIIENQFEVILEILKLFSATRNVSDLQHIGGSKYSGVAKIGNKISSLDNCILIYQSITGIFEKRIDLLKV

SEQ ID NO: 20 - protein, 1334 aa, Listeria monocytogenes
MKNPYTIGLDIGTNSVGWAVLTNQYDLVKRKMKVAGNSDKKQIKKNFWGVRLFDDGQTAVDRRMNRTARRRIERRRNRISYLQEIFAVEMANIDANFFCRLNDSFYVDSEKRNSRHPFFATIEEEVAYHDNYRTIYHLREKLVNSSEKADLRLVYLALAHIIKYRGNFLIEGALDTKNTSVDEVYKQFIETYNQVFMSNIEEGALAKVEENIEVANILAGKFTRREKFERILQLYPGEKSTGMFAQFISLIVGSKGNFQKVFDLIEKTDIECAKDSYEEDLETLLAIIGDEYAELFVAAKNTYNAVVLSSIITVTDTETNAKLSASMIERFDAHEKDLVELKAFIKLNLPKQYEEIFSNAAIDGYAGYIDGKTKQVDFYKYLKTILENIEGSDYFIAKIEEENFLRKQRTFDNGAIPHQLHLEELEAIIHQQAKYYPFLKEDYDKIKSLVTFRIPYFVGPLANGQSEFAWLTRKADGEIRPWNIEEKVDFGKSAVDFIEKMTNKDTYLPKENVLPKHSLCYQKYMVYNELTKIRYIDDQGKTNYFSGREKQQVFNDLFKQKRKVKKKDLELFLRNINHIESPTIEGLEDSFNASYATYHDLLKVGMKQEILDNPLNTEMLEDIVKILTVFEDKPMIKEQLQQFSDVLDGGVLKKLERRHYTGWGRLSAKLLVGIREKQSHLTILDYLMNDDGLNRNLMQLINDSNLSFKSIIEKEQVSTTDKDLQSIVAELAGSPAIKKGILQSLKIVDELVSIMGYPPQTIVVEMARENQTTGKGKNNSKPRYKSLEKAIKEFGSQILKEHPTDNQELKNNRLYLYYLQNGKDMYTGQELDIHNLSNYDIDHIVPQSFITDNSIDNLVLTSSAGNREKGGDVPPLEIVRKRKVFWEKLYQGNLMSKRKFDYLTKAERGGLTEADKARFIHRQLVETRQITKNVANILYQRFNKETDNHGNTMEQVRIVTLKSALVSQFRKQFQLYKVREVNGYHHAHDAYLNGVVANTLLKVYPQLEPEFVYGEYHQFDWFKANKATAKKQFYTNIMLFFAQKERIIDENGEILWDKKYLETIKKVLDYRQMNIVKKTEIQKGEFSKATIKPKGNSSKLIPRKENWDPMKYGGLDSPNMAYAVIIEHAKGKKKIVIEKKLIQINIMERKMFEKDEEAFLEEKGYRHPKVLTKLPKYTLYECEKGRRRMLASANEAQKGNQLVLSNHLVSLLYHAKNCEASDGKSLKYIEAHRETFSELLAQVSEFATRYTLADANLSKINNLFEQNKEGDIKAIAQSFVDLMAFNAMGAPASFKFFEATIDRKRYTNLKELLSSTIIYQSITGLYESRKRLDD

SEQ ID NO: 21 - protein, 1236 aa, Mycoplasma mobile
MYFYKNKENKLNKKVVLGLDLGIASVGWCLTDISQKEDNKFPIILHGVRLFETVDDSDDKLLNETRRKKRGQRRRNRRLFTRKRDFIKYLIDNNIIELEFDKNPKILVRNFIEKYINPFSKNLELKYKSVTNLPIGFHNLRKAAINEKYKLDKSELIVLLYFYLSLRGAFFDNPEDTKSKEMNKNEIEIFDKNESIKNAEFPIDKIIEFYKISGKIRSTINLKFGHQDYLKEIKQVFEKQNIDFMNYEKFAMEEKSFFSRIRNYSEGPGNEKSFSKYGLYANENGNPELIINEKGQKIYTKIFKTLWESKIGKCSYDKKLYRAPKNSFSAKVFDITNKLTDWKHKNEYISERLKRKILLSRFLNKDSKSAVEKILKEENIKFENLSEIAYNKDDNKINLPIINAYHSLTTIFKKHLINFENYLISNENDLSKLMSFYKQQSEKLFVPNEKGSYEINQNNNVLHIFDAISNILNKFSTIQDRIRILEGYFEFSNLKKDVKSSEIYSEIAKLREFSGTSSLSFGAYYKFIPNLISEGSKNYSTISYEEKALQNQKNNFSHSNLFEKTWVEDLIASPTVKRSLRQTMNLLKEIFKYSEKNNLEIEKIVVEVTRSSNNKHERKKIEGINKYRKEKYEELKKVYDLPNENTTLLKKLWLLRQQQGYDAYSLRKIEANDVINKPWNYDIDHIVPRSISFDDSFSNLVIVNKLDNAKKSNDLSAKQFIEKIYGIEKLKEAKENWGNWYLRNANGKAFNDKGKFIKLYTIDNLDEFDNSDFINRNLSDTSYITNALVNHLTFSNSKYKYSVVSVNGKQTSNLRNQIAFVGIKNNKETEREWKRPEGFKSINSNDFLIREEGKNDVKDDVLIKDRSFNGHHAEDAYFITIISQYFRSFKRIERLNVNYRKETRELDDLEKNNIKFKEKASFDNFLLINALDELNEKLNQMRFSRMVITKKNTQLFNETLYSGKYDKGKNTIKKVEKLNLLDNRTDKIKKIEEFFDEDKLKENELTKLHIFNHDKNLYETLKIIWNEVKIEIKNKNLNEKNYFKYFVNKKLQEGKISFNEWVPILDNDFKIIRKIRYIKFSSEEKETDEIIFSQSNFLKIDQRQNFSFHNTLYWVQIWVYKNQKDQYCFISIDARNSKFEKDEIKINYEKLKTQKEKLQIINEEPILKINKGDLFENEEKELFYIVGRDEKPQKLEIKYILGKKIKDQKQIQKPVKKYFPNWKKVNLTYMGEIFKK

SEQ ID NO: 22 - protein, 1372 aa, Legionella pneumophila
MESSQILSPIGIDLGGKFTGVCLSHLEAFAELPNHANTKYSVILIDHNNFQLSQAQRRATRHRVRNKKRNQFVKRVALQLFQHILSRDLNAKEETALCHYLNNRGYTYVDTDLDEYIKDETTINLLKELLPSESEHNFIDWFLQKMQSSEFRKILVSKVEEKKDDKELKNAVKNIKNFITGFEKNSVEGHRHRKVYFENIKSDITKDNQLDSIKKKIPSVCLSNLLGHLSNLQWKNLHRYLAKNPKQFDEQTFGNEFLRMLKNFRHLKGSQESLAVRNLIQQLEQSQDYISILEKTPPEITIPPYEARTNTGMEKDQSLLLNPEKLNNLYPNWRNLIPGIIDAHPFLEKDLEHTKLRDRKRIISPSKQDEKRDSYILQRYLDLNKKIDKFKIKKQLSFLGQGKQLPANLIETQKEMETHFNSSLVSVLIQIASAYNKEREDAAQGIWFDNAFSLCELSNINPPRKQKILPLLVGAILSEDFINNKDKWAKFKIFWNTHKIGRTSLKSKCKEIEEARKNSGNAFKIDYEEALNHPEHSNNKALIKIIQTIPDIIQAIQSHLGHNDSQALIYHNPFSLSQLYTILETKRDGFHKNCVAVTCENYWRSQKTEIDPEISYASRLPADSVRPFDGVLARMMQRLAYEIAMAKWEQIKHIPDNSSLLIPIYLEQNRFEFEESFKKIKGSSSDKTLEQAIEKQNIQWEEKFQRIINASMNICPYKGASIGGQGEIDHIYPRSLSKKHFGVIFNSEVNLIYCSSQGNREKKEEHYLLEHLSPLYLKHQFGTDNVSDIKNFISQNVANIKKYISFHLLTPEQQKAARHALFLDYDDEAFKTITKFLMSQQKARVNGTQKFLGKQIMEFLSTLADSKQLQLEFSIKQITAEEVHDHRELLSKQEPKLVKSRQQSFPSHAIDATLTMSIGLKEFPQFSQELDNSWFINHLMPDEVHLNPVRSKEKYNKPNISSTPLFKDSLYAERFIPVWVKGETFAIGFSEKDLFEIKPSNKEKLFTLLKTYSTKNPGESLQELQAKSKAKWLYFPINKTLALEFLHHYFHKEIVTPDDTTVCHFINSLRYYTKKESITVKILKEPMPVLSVKFESSKKNVLGSFKHTIALPATKDWERLFNHPNFLALKANPAPNPKEFNEFIRKYFLSDNNPNSDIPNNGHNIKPQKHKAVRKVFSLPVIPGNAGTMMRIRRKDNKGQPLYQLQTIDDTPSMGIQINEDRLVKQEVLMDAYKTRNLSTIDGINNSEGQAYATFDNWLTLPVSTFKPEIIKLEMKPHSKTRRYIRITQSLADFIKTIDEALMIKPSDSIDDPLNMPNEIVCKNKLFGNELKPRDGKMKIVSTGKIVTYEFESDSTPQWIQTLYVTQLKKQP

SEQ ID NO: 23 - protein, 1122 aa, Streptococcus thermophilus
MSDLVLGLDIGIGSVGVGILNKVTGEIIHKNSRIFPAAQAENNLVRRTNRQGRRLTRRKKHRIVRLNRLFEESGLITDFTKISINLNPYQLRVKGLTDELSNEELFIALKNMVKHRGISYLDDASDDGNSSVGDYAQIVKENSKQLETKTPGQIQLERYQTYGQLRGDFTVEKDGKKHRLINVFPTSAYRSEALRILQTQQEFNSQITDEFINRYLEILTGKRKYYHGPGNEKSRTDYGRYRTNGETLDNIFGILIGKCTFYPDEFRAAKASYTAQEFNLLNDLNNLTVPTETKKLSKEQKNQIINYVKNEKVMGPAKLFKYIAKLLSCDVADIKGHRIDKSGKAEIHTFEAYRKMKTLETLDIEQMDRETLDKLAYVLTLNTEREGIQEALEHEFADGSFSQKQVDELVQFRKANSSIFGKGWHNFSVKLMMELIPELYETSEEQMTILTRLGKQKTTSSSNKTKYIDEKLLTEEIYNPVVAKSVRQAIKIVNAAIKEYGDFDNIVIEMARETNEDDEKKAIQKIQKANKDEKDAAMLKAANQYNGKAELPHSVFHGHKQLATKIRLWHQQGERCLYTGKTISIHDLINNPNQFEVDHILPLSITFDDSLANKVLVYATANQEKGQRTPYQALDSMDDAWSFRELKAFVRESKTLSNKKKEYLLTEEDISKFDVRKKFIERNLVDTRYASRVVLNALQEHFRAHKIDTKVSVVRGQFTSQLRRHWGIEKTRDTYHHHAVDALIIAASSQLNLWKKQKNTLVSYSEEQLLDIETGELISDDEYKESVFKAPYQHFVDTLKSKEFEDSILFSYQVDSKFNRKISDATIYATRQAKVGKDKKDETYVLGKIKDIYTQDGYDAFMKIYKKDKSKFLMYRHDPQTFEKVIEPILENYPNKEMNEKGKEVPCNPFLKYKEEHGYIRKYSKKGNGPEIKSLKYYDSKLLGNPIDITPENSKNKVVLQSLKPWRTDVYFNKNTGKYEILGLKYADLQFEKKTGTYKISQEKYNGIMKEEGVDSDSEFKFTLYKNDLLLVKDTETKEQQLFRFLSRTMPNVKYYVELKPYSKDKFEKNESLIEILGSADKSGRCIKGLGKSNISIYKVRTDVLGNQHIIKNEGDKPKLDF

SEQ ID NO: 24 - protein, 1128 aa, Streptococcus thermophilus
MSDLVLGLDIGIGSVGVGILNKVTGEIIHKNSRIFPAAQAENNLVRRTNRQGRRLTRRKKHRIVRLNRLFEESGLITDFTKISINLNPYQLRVKGLTDELSNEELFIALKNMVKHRGISYLDDASDDGNSSVGDYAQIVKENSKQLETKTPGQIQLERYQTYGQLRGDFTVEKDGKKHRLINVFPTSAYRSEALRILQTQQEFNPQITDEFINRYLEILTGKRKYYHGPGNEKSRTDYGRYRTSGETLDNIFGILIGKCTFYPEEFRAAKASYTAQEFNLLNDLNNLTVPTETKKLSKEQKNQIINYVKNEKAMGPAKLFKYIAKLLSCDVADIKGYRIDKSGKAEIHTFEAYRKMKTLETLDIEQMDRETLDKLAYVLTLNTEREGIQEALEHEFADGSFSQKQVDELVQFRKANSSIFGKGWHNFSVKLMMELIPELYETSEEQMTILTRLGKQKRLRLQIKQNISNKTKYIDEKLLTEEIYNPVVAKSVRQAIKIVNAAIKEYGDFDNIVIEMARETNEDDEKKAIQKIQKANKDEKDAAMLKAANQYNGKAELPHSVFHGHKQLATKIRLWHQQGERCLYTGKTISIHDLINNPNQFEVDHILPLSITFDDSLANKVLVYATANQEKGQRTPYQALDSMDDAWSFRELKAFVRESKTLSNKKKEYLLTEEDISKFDVRKKFIERNLVDTRYASRVVLNALQEHFRAHKIDTKVSVVRGQFTSQLRRHWGIEKTRDTYHHHAVDALIIAASSQLNLWKKQKNTLVSYSEEQLLDIETGELISDDEYKESVFKAPYQHFVDTLKSKEFEDSILFSYQVDSKFNRKISDATIYATRQAKVGKDKKDETYVLGKIKDIYTQDGYDAFMKIYKKDKSKFLMYRHDPQTFEKVIEPILENYPNKQMNEKGKEVPCNPFLKYKEEHGYIRKYSKKGNGPEIKSLKYYDSKLLGNPIDITPENSKNKVVLQSLKPWRTDVYFNKATGKYEILGLKYADLQFEKGTGTYKISQEKYNDIKKKEGVDSDSEFKFTLYKNDLLLVKDTETKEQQLFRFLSRTLPKQKHYVELKPYDKQKFEGGEALIKVLGNVANGGQCIKGLAKSNISIYKVRTDVLGNQHIIKNEGDKPKLDF

SEQ ID NO: 25 - protein, 1123 aa, Francisella tularensis
MNVKILPIAIDLDVKNTGVFSAFYQKGTSLEKLDNKNGKVYELSKDSYTLLMNNRTARRHKRRGIDRKQLVKRLFKLVWTEQLNLEWDKDTQQAISFLFNRRGFSFITDGYSTEYLNIVPEQVKAILMDIFDDYNGEDDLDSYLKLATEQESKISEIYNKLMQKILEFKLRKLCTDIKDDKVSTKTLKEITSYEFELLADYLANYSESLKTQKFSYTDKQGNLKELSYYHHDKYNIQEFLKRHATINDEILGTLLTDDFDIWNFNFEKFDFDKNEEKLQNQEDKDHTQAHLHHFVFVVNKIKSEMASGGRHRSQYFQEITNVLDENNHQEGYLKNFCENLHNKKYSNLSVKNLVNLVGNLSNLELKPLRKYFNDKIHAKADHWDEQKFTETYCHWILGEWRVGVKDQDKKDGAKYSYKDLCNELKQKVTKAGLIDFLLELDPCRTIPPYLDNNNRKPPKCQSLILNPKFLDNQYPNWQQYLQELKKLQSIQDYLDSFETDLKDLKSSKDQPYFVEYKSSNQQMASGQRDYKDLDARILQFIFDRVKASDELLLNEIYFQAKKLKQKASSELEKLESSKKLDEVIANSQLSQILKSQHTNGIFEQGTFLHLVCKYYKQRQRARDSRLYIMPEYRYDKKLDKYNNTGRFDDNNQLLTYCNHKPRQKRYQLLNDLAGVLQVSRNQLLSSVEEWFQQAQRVGEISKSQDEQIFEWLKSFKIASYCKAAVEMQKQYRGTLKNAIQTAIFRQSENINKNKNTGNQQQALSENSKDVKSLTADEKKLLKLIENIAKASQKIGESLGLNDKQIKKFNSIYSFAQIQQIAFAKRKGNANTCAVCSADNAHRMQQIKITELVEDNKDNIILSAKAQRLPAIPTRIVDGAVKKMATILAKNIVDDNWQNIKQVLSAKHQLHIPIITESNAFEFEPALADVKGKSLKDRRKKALERISPENIFKDKNNRIKEFAKGISAYSGANLTDGDFDGAKEELDHIIPRSHKKYGTLNDEANLICVTRDDNKNIFAIDTSKWFEIETPSDLRDIGVATIQYKIDNNSRPKVRVKLDYVIDDDSKINYFMNHSLLKSRYPDKVLEILKQSTIIEFESSGFNKTIKEMLGMTLAGIYNETSNN

SEQ ID NO: 26 - protein, 1436 aa, Bacteroides fragilis
MKRILGLDLGTNSIGWALVNEAENKDERSSIVKLGVRVNPLTVDELTNFEKGKSITTNADRTLKRGMRRNLQRYKLRRETLTEVLKEHKLITEDTILSENGNRTTFETYRLRAKAVTEEISLEEFARVLLMINKKRGYKSSRKAKGVEEGTLIDGMDIARELYNNNLTPGELCLQLLDAGKKFLPDFYRSDLQNELDRIWEKQKEYYPEILTDVLKEELRGKKRDAVWAICAKYFVWKENYTEWNKEKGKTEQQEREHKLEGIYSKRKRDEAKRENLQWRVNGLKEKLSLEQLVIVFQEMNTQINNSSGYLGAISDRSKELYFNKQTVGQYQMEMLDKNPNASLRNMVFYRQDYLDEFNMLWEKQAVYHKELTEELKKEIRDIIIFYQRRLKSQKGLIGFCEFESRQIEVDIDGKKKIKTVGNRVISRSSPLFQEFKIWQILNNIEVTVVGKKRKRRKLKENYSALFEELNDAEQLELNGSRRLCQEEKELLAQELFIRDKMTKSEVLKLLFDNPQELDLNFKTIDGNKTGYALFQAYSKMIEMSGHEPVDFKKPVEKVVEYIKAVFDLLNWNTDILGFNSNEELDNQPYYKLWHLLYSFEGDNTPTGNGRLIQKMTELYGFEKEYATILANVSFQDDYGSLSAKAIHKILPHLKEGNRYDVACVYAGYRHSESSLTREEIANKVLKDRLMLLPKNSLHNPVVEKILNQMVNVINVIIDIYGKPDEIRVELARELKKNAKEREELTKSIAQTTKAHEEYKTLLQTEFGLTNVSRTDILRYKLYKELESCGYKTLYSNTYISREKLFSKEFDIEHIIPQARLFDDSFSNKTLEARSVNIEKGNKTAYDFVKEKFGESGADNSLEHYLNNIEDLFKSGKISKTKYNKLKMAEQDIPDGFIERDLRNTQYIAKKALSMLNEISHRVVATSGSVTDKLREDWQLIDVMKELNWEKYKALGLVEYFEDRDGRQIGRIKDWTKRNDHRHHAMDALTVAFTKDVFIQYFNNKNASLDPNANEHAIKNKYFQNGRAIAPMPLREFRAEAKKHLENTLISIKAKNKVITGNINKTRKKGGVNKNMQQTPRGQLHLETIYGSGKQYLTKEEKVNASFDMRKIGTVSKSAYRDALLKRLYENDNDPKKAFAGKNSLDKQPIWLDKEQMRKVPEKVKIVTLEAIYTIRKEISPDLKVDKVIDVGVRKILIDRLNEYGNDAKKAFSNLDKNPIWLNKEKGISIKRVTISGISNAQSLHVKKDKDGKPILDENGRNIPVDFVNTGNNHHVAVYYRPVIDKRGQLVVDEAGNPKYELEEVVVSFFEAVTRANLGLPIIDKDYKTTEGWQFLFSMKQNEYFVFPNEKTGFNPKEIDLLDVENYGLISPNLFRVQKFSLKNYVFRHHLETTIKDTSSILRGITWIDFRSSKGLDTIVKVRVNHIGQIVSVGEY

SEQ ID NO: 27 - protein, 1314 aa, Mycoplasma synoviae
MLRLYCANNLVLNNVQNLWKYLLLLIFDKKIIFLFKIKVILIRRYMENNNKEKIVIGFDLGVASVGWSIVNAETKEVIDLGVRLFSEPEKADYRRAKRTTRRLLRRKKFKREKFHKLILKNAEIFGLQSRNEILNVYKDQSSKYRNILKLKINALKEEIKPSELVWILRDYLQNRGYFYKNEKLTDEFVSNSFPSKKLHEHYEKYGFFRGSVKLDNKLDNKKDKAKEKDEEEESDAKKESEELIFSNKQWINEIVKVFENQSYLTESFKEEYLKLFNYVRPFNKGPGSKNSRTAYGVFSTDIDPETNKFKDYSNIWDKTIGKCSLFEEEIRAPKNLPSALIFNLQNEICTIKNEFTEFKNWWLNAEQKSEILKFVFTELFNWKDKKYSDKKFNKNLQDKIKKYLLNFALENFNLNEEILKNRDLENDTVLGLKGVKYYEKSNATADAALEFSSLKPLYVFIKFLKEKKLDLNYLLGLENTEILYFLDSIYLAISYSSDLKERNEWFKKLLKELYPKIKNNNLEIIENVEDIFEITDQEKFESFSKTHSLSREAFNHIIPLLLSNNEGKNYESLKHSNEELKKRTEKAELKAQQNQKYLKDNFLKEALVPLSVKTSVLQAIKIFNQIIKNFGKKYEISQVVIEMARELTKPNLEKLLNNATNSNIKILKEKLDQTEKFDDFTKKKFIDKIENSVVFRNKLFLWFEQDRKDPYTQLDIKINEIEDETEIDHVIPYSKSADDSWFNKLLVKKSTNQLKKNKTVWEYYQNESDPEAKWNKFVAWAKRIYLVQKSDKESKDNSEKNSIFKNKKPNLKFKNITKKLFDPYKDLGFLARNLNDTRYATKVFRDQLNNYSKHHSKDDENKLFKVVCMNGSITSFLRKSMWRKNEEQVYRFNFWKKDRDQFFHHAVDASIIAIFSLLTKTLYNKLRVYESYDVQRREDGVYLINKETGEVKKADKDYWKDQHNFLKIRENAIEIKNVLNNVDFQNQVRYSRKANTKLNTQLFNETLYGVKEFENNFYKLEKVNLFSRKDLRKFILEDLNEESEKNKKNENGSRKRILTEKYIVDEILQILENEEFKDSKSDINALNKYMDSLPSKFSEFFSQDFINKCKKENSLILTFDAIKHNDPKKVIKIKNLKFFREDATLKNKQAVHKDSKNQIKSFYESYKCVGFIWLKNKNDLEESIFVPINSRVIHFGDKDKDIFDFDSYNKEKLLNEINLKRPENKKFNSINEIEFVKFVKPGALLLNFENQQIYYISTLESSSLRAKIKLLNKMDKGKAVSMKKITNPDEYKIIEHVNPLGINLNWTKKLENNN

SEQ ID NO: 28 - protein, 1368 aa, Streptococcus pyogenes
MDKKYSIGLDIGTNSVGWAVITDDYKVPSKKFKVLGNTDRHSIKKNLIGALLFDSGETAEATRLKRTARRRYTRRKNRICYLQEIFSNEMAKVDDSFFHRLEESFLVEEDKKHERHPIFGNIVDEVAYHEKYPTIYHLRKKLVDSTDKADLRLIYLALAHMIKFRGHFLIEGDLNPDNSDVDKLFIQLVQTYNQLFEENPINASGVDAKAILSARLSKSRRLENLIAQLPGEKKNGLFGNLIALSLGLTPNFKSNFDLAEDAKLQLSKDTYDDDLDNLLAQIGDQYADLFLAAKNLSDAILLSDILRLNSEITKAPLSASMIKRYDEHHQDLTLLKALVRQQLPEKYKEIFFDQSKNGYAGYIDGGASQEEFYKFIKPILEKMDGTEELLAKLNREDLLRKQRTFDNGSIPHQIHLGELHAILRRQEDFYPFLKDNREKIEKILTFRIPYYVGPLARGNSRFAWMTRKSEETITPWNFEEVVDKGASAQSFIERMTNFDKNLPNEKVLPKHSLLYEYFTVYNELTKVKYVTEGMRKPAFLSGEQKKAIVDLLFKTNRKVTVKQLKEDYFKKIECFDSVEISGVEDRFNASLGTYHDLLKIIKDKDFLDNEENEDILEDIVLTLTLFEDREMIEERLKTYAHLFDDKVMKQLKRRRYTGWGRLSRKLINGIRDKQSGKTILDFLKSDGFANRNFMQLIHDDSLTFKEDIQKAQVSGQGDSLHEHIANLAGSPAIKKGILQTVKVVDELVKVMGRHKPENIVIEMARENQTTQKGQKNSRERMKRIEEGIKELGSQILKEHPVENTQLQNEKLYLYYLQNGRDMYVDQELDINRLSDYDVDHIVPQSFIKDDSIDNKVLTRSDKNRGKSNNVPSEEVVKKMKNYWRQLLNAKLITQRKFDNLTKAERGGLSELDKAGFIKRQLVETRQITKHVAQILDSRMNTKYDENDKLIREVKVITLKSKLVSDFRKDFQFYKVREINNYHHAHDAYLNAVVGTALIKKYPKLESEFVYGDYKVYDVRKMIAKSEQEIGKATAKYFFYSNIMNFFKTEITLANGEIRKRPLIETNGETGEIVWDKGRDFATVRKVLSMPQVNIVKKTEVQTGGFSKESILPKRNSDKLIARKKDWDPKKYGGFDSPTVAYSVLVVAKVEKGKSKKLKSVKELLGITIMERSSFEKNPIDFLEAKGYKEVRKDLIVKLPKYSLFELENGRKRMLASAGELQKGNELALPSKYVNFLYLASHYEKLKGSPEDNEQKQLFVEQHKHYLDEIIEQISEFSKRVILADANLDKVLSAYNKHRDKPIREQAENIIHLFTLTNLGAPAAFKYFDTTIDRKRYTSTKEVLDATFIHQSITGLYETRIDLSQLGGD

SEQ ID NO: 29 - protein, 1368 aa, Streptococcus pyogenes
MDKKYSIGLDIGTNSVGWAVITDDYKVPSKKFKVLGNTDRHSIKKNLIGALLFDSGETAEATRLKRTARRRYTRRKNRICYLQEIFSNEMAKVDDSFFHRLEESFLVEEDKKHERHPIFGNIVDEVAYHEKYPTIYHLRKKLVDSTDKADLRLIYLALAHMIKFRGHFLIEGDLNPDNSDVDKLFIQLVQTYNQLFEENPINASGVDAKAILSARLSKSRRLENLIAQLPGEKKNGLFGNLIALSLGLTPNFKSNFDLAEDAKLQLSKDTYDDDLDNLLAQIGDQYADLFLAAKNLSDAILLSDILRVNTEITKAPLSASMIKRYDEHHQDLTLLKALVRQQLPEKYKEIFFDQSKNGYAGYIDGGASQEEFYKFIKPILEKMDGTEELLVKLNREDLLRKQRTFDNGSIPHQIHLGELHAILRRQEDFYPFLKDNREKIEKILTFRIPYYVGPLARGNSRFAWMTRKSEETITPWNFEEVVDKGASAQSFIERMTNFDKNLPNEKVLPKHSLLYEYFTVYNELTKVKYVTEGMRKPAFLSGEQKKAIVDLLFKTNRKVTVKQLKEDYFKKIECFDSVEISGVEDRFNASLGTYHDLLKIIKDKDFLDNEENEDILEDIVLTLTLFEDREMIEERLKTYAHLFDDKVMKQLKRRRYTGWGRLSRKLINGIRDKQSGKTILDFLKSDGFANRNFMQLIHDDSLTFKEDIQKAQVSGQGDSLHEHIANLAGSPAIKKGILQTVKVVDELVKVMGRHKPENIVIEMARENQTTQKGQKNSRERMKRIEEGIKELGSQILKEHPVENTQLQNEKLYLYYLQNGRDMYVDQELDINRLSDYDVDHIVPQSFLKDDSIDNKVLTRSDKNRGKSDNVPSEEVVKKMKNYWRQLLNAKLITQRKFDNLTKAERGGLSELDKAGFIKRQLVETRQITKHVAQILDSRMNTKYDENDKLIREVKVITLKSKLVSDFRKDFQFYKVREINNYHHAHDAYLNAVVGTALIKKYPKLESEFVYGDYKVYDVRKMIAKSEQEIGKATAKYFFYSNIMNFFKTEITLANGEIRKRPLIETNGETGEIVWDKGRDFATVRKVLSMPQVNIVKKTEVQTGGFSKESILPKRNSDKLIARKKDWDPKKYGGFDSPTVAYSVLVVAKVEKGKSKKLKSVKELLGITIMERSSFEKNPIDFLEAKGYKEVKKDLIIKLPKYSLFELENGRKRMLASAGELQKGNELALPSKYVNFLYLASHYEKLKGSPEDNEQKQLFVEQHKHYLDEIIEQISEFSKRVILADANLDKVLSAYNKHRDKPIREQAENIIHLFTLTNLGAPAAFKYFDTTIDRKRYTSTKEVLDATLIHQSITGLYETRIDLSQLGGD

SEQ ID NO: 30 - protein, 1370 aa, Streptococcus agalactiae; identical to SEQ ID NO: 11

SEQ ID NO: 31 - protein, 1173 aa, Rhodospirillum rubrum
MRPIEPWILGLDIGTDSLGWAVFSCEEKGPPTAKELLGGGVRLFDSGRDAKDHTSRQAERGAFRRARRQTRTWPWRRDRLIALFQAAGLTPPAAETRQIALALRREAVSRPLAPDALWAALLHLAHHRGFRSNRIDKRERAAAKALAKAKPAKATAKATAPAKEADDEAGFWEGAEAALRQRMAASGAPTVGALLADDLDRGQPVRMRYNQSDRDGVVAPTRALIAEELAEIVARQSSAYPGLDWPAVTRLVLDQRPLRSKGAGPCAFLPGEDRALRALPTVQDFIIRQTLANLRLPSTSADEPRPLTDEEHAKALALLSTARFVEWPALRRALGLKRGVKFTAETERNGAKQAARGTAGNLTEAILAPLIPGWSGWDLDRKDRVFSDLWAARQDRSALLALIGDPRGPTRVTEDETAEAVADAIQIVLPTGRASLSAKAARAIAQAMAPGIGYDEAVTLALGLHHSHRPRQERLARLPYYAAALPDVGLDGDPVGPPPAEDDGAAAEAYYGRIGNISVHIALNETRKIVNALLHRHGPILRLVMVETTRELKAGADERKRMIAEQAERERENAEIDVELRKSDRWMANARERRQRVRLARRQNNLCPYTSTPIGHADLLGDAYDIDHVIPLARGGRDSLDNMVLCQSDANKTKGDKTPWEAFHDKPGWIAQRDDFLARLDPQTAKALAWRFADDAGERVARKSAEDEDQGFLPRQLTDTGYIARVALRYLSLVTNEPNAVVATNGRLTGLLRLAWDITPGPAPRDLLPTPRDALRDDTAARRFLDGLTPPPLAKAVEGAVQARLAALGRSRVADAGLADALGLTLASLGGGGKNRADHRHHFIDAAMIAVTTRGLINQINQASGAGRILDLRKWPRTNFEPPYPTFRAEVMKQWDHIHPSIRPAHRDGGSLHAATVFGVRNRPDARVLVQRKPVEKLFLDANAKPLPADKIAEIIDGFASPRMAKRFKALLARYQAAHPEVPPALAALAVARDPAFGPRGMTANTVIAGRSDGDGEDAGLITPFRANPKAAVRTMGNAVYEVWEIQVKGRPRWTHRVLTRFDRTQPAPPPPPENARLVMRLRRGDLVYWPLESGDRLFLVKKMAVDGRLALWPARLATGKATALYAQLSCPNINLNGDQGYCVQSAEGIRKEKIRTTSCTALGRLRLSKKAT

SEQ ID NO: 32 - protein, 997 aa, Maritimibacter alkaliphilus
MKVLVDAGLMPSDPAAAKALETLDPYELRATGLDVMLPLTHLGRAVFHLNQRRGFKSNRKTDRGDNESGKIKDATKRLTWAMQEAGARTYGEFLHMRRARASDPRQVPSVRTRLSVASRGGPDSKEEAGYDFYPERAHLEDEFHALWSAQAAFHPDLTCELRDVVFEKIFYQRPLKEPKVGLCLFTAEERLPKAHPLTGRRVLYETVNQLRVTADGRTTRPLTLEERDMIVYALDNKKPVKSLSSMHLKLVALGKLVKLKDGERFTLESGVRDAIACDPIRATMGHPDGFGPAWSRLDWQAQWALIEKLRQVQSDDDFASLVAWLGATHNLSEDHAKRVANLHLPEGYGRLGLTATEAILCNLKAEVCTYSQAVERWGKHHSNQRTGECLEALPYYGEVLDRHVIPGTYNEDDDDVTRYGRITNPTVHIGLNQLRRLVNRIIATYGKPDQIVVELARELKQSEAQKSEALKKIRDTTADAIRRGRQLEEIGQKNTGANRLLLRLWEDLGPAVGPRCCPYTGKPISVTMLFDGACDVDHILPYSRTLDDSFANRTICLREANRQKGDRTPWEAWGGSDQWDAIEANLKDLPENKRKRFAPDAMERFEGERDFLDRALVDTQYLARISRAYLDTLFTEGGHVWVVPGRMTEMLRRHWGLNALLSDKDRGAGKVKNRTDHRHHAIDAAVIAATDHSLVNRISKAAGQGESAGQSAELIARDTPEPWEGFRNDISAQIARIVVSHRADHGRIDVEGRKHGKDSTAGRLHNDTAYGIVDDHTVVSRTPLLSLKPGDIEVTTKGKNIRDTQLQKALSVATTGKDGKGFEEALRNFAEKEGPYQGIRRVRLIETLQSSARVEVGSDEDGQPLKAYKGDSNHCYDLWKLPDGKVVPHVVSTYEAHAGTDKRPHPAAKRILRVFKKDMVAIEQDDQTAIFYVQKLDRANGLFLAPHLEANADARHRNPNDAFKFLQMGAGSVVRNKLRRVYVDEIGRIKDPGPPKH

SEQ ID NO: 33 - protein, 1027 aa, Blastopirellula marina
MFSESGDQPSLVDCGVRIFPEGVERDQQGGEKSKSQSRRVARGIRRQVRRRAQRLRHLKHALITTGLFPADVVDQQEVLASNPYELRSRALSEKLEPYEIGRILLHLAKRRGFLSNRTTDRSGGNELKGILAEMTQLQGEIAAHGCQTLGQYLHQLGDDGETFAQRLRGRHTLRAMYEDEFEKIWERQASYYPALLTEELRGGEEGKQSYPLVPTARRKSESLLKRFGLHGLLFFQRKMYWPKSVIGRCDLEPKEKRCPKADRLAQRFRILQEVNNLRLISPADRKEYTFAEFVGAGADKKLVDYLCEAKERTFPQIRKKFKLPETISFNYERGERSKLQGHETDAHFNGKKGLGKRRWSEIAEDVKDHIIQIVLEEDREDVALRKLTQDCSLTVEEAHKAMALHLPAGYSQYSRVAISRLLPHLELGKLLMGNDASDSAMHAAGYLRPDEREVRQYDLLPEPPDIPNPLVRQALYEVRKVINAIIREYGALGTIRVELAREAKKSAEQRTQIRIANAKRERENAAIAKTLQEMSPAIRPTRRNIQRYLLWKDQGGVCIYTGKVISQAQLFDSGEVDVDHILPRWRSLDDSMANKVIAHRSANNEKGDRTPWEWLGHDKPRFDELLLRAQRLPYGKRQRFIQKEVELTNFVERQLRDTTYVSRLVVQYLKGLGVPITTVKGPMTAELRHHWGLNALLNEDGSQKKNRSDHRHHAIDAIVIGLTDAKRLHALANARGKDLQPPWSEFRSDVATALGRMAVSHRVRRRIQGALHEETIYGPTQKAAQPTSTDQRPWAKDWIEDSQIVVRRKSVSDLTNTKHLAKIRDVTIRKILEDHLRRQKVDPTKPGVIPKDAFAGSNAPQMPSGVPIKKVRLVERGETWRKIGSGEASKFIKPGSNHHISYFAISRKGRESWKAHVTIMLDAACIAKESINNGKIVNRSIGDQGRFLMSLSIGEMFEITNNGGEILLCVVRKIDQSGRIYYKIHDDARESMDLKKDNLYMSPSKMQQFDARKVTVTPLGKIRNAND

SEQ ID NO: 34 - protein, 158 aa, Francisella tularensis
MIDFLLELDPCITIPPYLDNNNRKPPKCQSLILNPKFLDNQYPNWQQYLQELKKLQSIQDYLDSFETDLKDLKSSKDQPYFVEYKSSNQQMASGQRDYKDLDARILQFIFDRVKASDELLLSEIYFQAKKLKQKASSELEKLESSKKLDEVIANSQLS

SEQ ID NO: 35 - protein, 393 aa, Francisella tularensis
MNVKILPIAIDLDVKNTGVFSAFYQKGTSLEKLDNKNGKVYELSKDSYTLLMNNRTAQRHQRRGIDRKQLVKRLFKLVWTEQLNLEWDKDTQQAISFLFNRRGFSFITDGYSTEYLNIVPEQVKAILMDIFDDYNGEDDLDSYLKLATEQESKISEIYNKLMQKILEFKLRKLCTDIKDDKVSTKTLKEITSYEFELLADYLANYSESLKTQKFSYTDKQGNLKELSYYHHDKYNIQEFLKRHATINDEILDTLLTDDFDIWNFNFEKFDFDKNEEKLQSQEDKDHTQAYFHHFVFAVNKIKSEMASGGRHRSQYFQEITNVLDENNHQEGYLKNFCENLHNKKYSNLSVKNLVNLVGNLSNLELKPLRKYFNDKNLIIGMSKSLQKLIATGY

SEQ ID NO: 36 - protein, 1066 aa, Rhodopseudomonas palustris
MSERVVRRILGIDLGIASCGWGVVDISGAGGGIIATGVRCFDAPLIDKTGEPKSATRRTARGQRRIVRRRRQRMNGVRRLLCEFGLLPDPRPDALNQAMRRISTASAAAQVTPWTLRAAAHQRLLSNEELAVVLGHIARHRGFRSNAKNEAGANAADETSKMKKAMEATREGLAKYHAFGDMIANDPKFANRKRNRDKDYSHTAKRSDLEDEVRAILRAQLRFGSAAATETLAQTFADVAFFQRPLQDSEDRVGDCPFEPGQKRAARRAPSFELFRFLSRLANLKLAVGRSPERRLTAEEIALAAKGFGETKKTITFKSLREALDLDPNARFSGIGKDKEASLDVVARTGGAAYGTKTLKDALGDAPWRSLSRTPETLDRIAEILSFREDITSIRNGLEDLGLDSLVVEALMQAAANGDFKEFTRAGHISARAARNIIPGLREGLVYSEACARVGYDHAARLSVPLDQVGSPVTRKALSEALKQVRAVAREYGPIDYFHIELARSVGKSAEERKQLTDGIEARNVEKAKRRKQAEEHLGRAPSDDELLRYELAKEQNFKCIYSGDAIDPAGVAANDTRYQVDHILPWSRFGDDSYLNKTLCTARSNQNKRGRTPFEWFEADKTDVEWMEYVARVENLQEVKGRKKRNYSIKDAAAIEDKFKARNLTDTQWATRLLADELSRMFPPRECERAICGRADGGNDGLTIVEERRVFTRPGAITSKLRRAWGLEGLKKQDGKRVEDDRHHAVDALVLAATTESLLQRLTVEVQRREREGRPDDIFHCAEPWRGFRADVRRTVYGSETMPGIFVSRAERRRARGKAHDATIKQIREIEGERLVFERKPVEKLTDKDLEKIPIPKPYGQVSDPKRLRDELVESLRAWIAAGKPKDRPPLSPKGDVIRKVRIQTNDKVSVEINGGTVDRGDMARVDVFRKKNKKAVWEYYVVPIYPHQIVALNDPPDRAVIAYAEDKDWKEIDSSYEFLWSLFGLSYVEISKANGECIDGYFRGLHRGTGAASVCKHISLGKDATVSGIGLKTLASFKKFTIDRLGRKFEIPREVRTWRGEACT

SEQ ID NO: 37 - protein, 1149 aa, Lactobacillus salivarius
MERYHIGLDIGTSSIGWAVIGDDFKIKRKKGKNLIGVRLFKEGDTAAERRGFRTQRRRLNRRKWRLKLLEEIFDPYMAEVDKYFFARLKESNLSPKDSNKKYLGSLLFPDISDSNFYDKYPTIYHLRRDLMEKDKKFDLREIYLAIHHIVKYRGNFLEKVPAKNYKNSGASIGFLLEEVNDLYGNIIGNEDVAILDNDKFEDVEKIILNDEIRNIDKQKNVGRLLVKDKKEKNIVTAFSKAIFGYKFNLEDLLLIESDEKNKLTFNDENIDDIFNELSHSLNDNQMDLLTKTREIYFKFKLNMIVPTGYTISESMIEKYEMHKAHLKMYKEFINTLNAKDRKILKNAYSDYINNEKAKAANAQENFYKTVKKTIKENDSDTAKKIIGLIDEGNFMPKQRTGENGVIPHQLHQIELDRIIENQAKYYPWLAEENPVEKNRKFAKYKLDELVTFRVPYYVGPLIDKTESNKNEKETKFAWMVRKAKGTITPWNFENLVDRTESANRFIKRMTSKDTYIIGEDVLPASSLLYEKYKVLNELNNIKVNKKKLDVEQKQHVYLDLFTTRKNVTKDDLATSLNCDVESITGLTDNKKFNSSLSSYIDLKAILGNIVDDYSKNEDLEKIIEYSTIFEDGNIYKEKLSEISWLTDEQIEKLSNIHFKGWGRLSKKLLTQITNENGERIIDTLWNTSNNFIQVISDESIQAKLAEINGEYANKYNLEDILDEAYTSPQNKKAIRQVMKVVEDIEKAMKCEPTSIAIEFTREKRKSKLTNTRYKKISETYEKITDELISEYELGKLQSELDSKVNNMRDRYYLYFMQLGRDMYTGEKMNIDELHQKYDIDHILPQSFIKDDSLNNRVLTSKSVNIKEKSDKTAADLYAAKMGDFWRKLRKQGLMTEQKYKNLLTRTDSINKYTKQSFIKRQLVETSQVVKLAANILQDKYRNTKIIEIRARLNSDLRKKYELIKNREVNDYHHAIDGYLTTFVGQYLYKVYPKLRSYFVYDDFKKLDSNYLKHMDKFNFIWKLEDKKAEDVYDKVNDEFVLNVPEMKEYIRKIYNYKYMLVSKEVTTKNGAFYDQTKYNAKTINLIPIKKDKPTNIYGGYKGKVSSYMMLVKIQKKKEVIYKFVGVPRLWTDELDRLIDTDEKKALLKK

SEQ ID NO: 38 - protein, 1064 aa, Rhodopseudomonas palustris
MSECVTRRILGIDLGIASCGWGVIEVGEASGSIIASGVRCFDAPLIDKTGEPKSATRRTARGQRRIIRRRRQRMNAVRRLLAEFGVLTGRSPDALHQALLRLSQSVAGSQVTPWTLRAAAHERKLTNDELAVVLGHIARHRGFRSNSKNDGGANAADETSKMKKAMETTREGLARYHSFGAMIASDPKFADRKRNRDKDYSHTAKRSDLEDEVRTIFRSQTRFGSLVASEKLSQAFADAAFFQRPLQDSEDMVGSCPFEPGQKRTARRAPSFELFRFLSRLANLKLTVGRAPERRLTPDEIALAAKGFGETKKSITFKSLREALDLDPNARFSGVAKEKESTLDVAARTGGAAYGTKTLKDALGDAPWRSLSRMPEKLDRIAEILSFREDMKAIRNGLEEVGLDGLVVDALMQATANGDFKDFTRAAHISALAARNIIPGLREGLVYSDACTRVGYDHAARPAVPLSQIGSPVTRKALSEALKQVRAVAREYGPIDYFHIELARSIGKSAEERKKLTDGIEARNVEKEKRRKEAAEHLGRAPSDDELLRYELAKEQNFKCIYSGDPIDPAGISANDTRYQVDHILPWSRFGDDSYVNKTLCTARSNQNKRGRTPFEWFDADKTEAEWMEYSARVEDLKEVKGRKKRNYSIKDAASVEDKFKARNLTDTQWATRLLADELKRMFPPRECERVVTVRADGGNDGLSIVEERRVFTRPGAITSKLRRAWGLEGLKKQDGKRVEDDRHHAVDALVLAATTESLLNRLTVEVQQREREGRQDDIFHCSQPWPGFRVDVQRTVYGSETMPGIFVSRAERRRARGKAHDATVKQIRDIDGERIVFERKPIEKLTDKDLERIPVPEPYGKAADPKKLRDELVENLRAWIAAGKPKDKPPRSPKGDIIRKVRIETKDKVAVEINGGTVDRGDMARVDVFRKKNKKGVWEFYVIPIYPHQIVASALPPNRAVIAYKAESEWTAIDGCFEFAWSLNPMSYLELVKSNGELIEGYFRSMDRTTGAINLSPMSTNSETIRSIGVKTLSSFRKFTVDRLGRKFEIPREVRTWRGEACT

SEQ ID NO: 39 - protein, 1166 aa, Nitrobacter hamburgensis
MHVEIDFPHFSRGDSHLAMNKNEILRGSSVLYRLGLDLGSNSLGWFVTHLEKRGDRHEPVALGPGGVRIFPDGRDPQSGTSNAVDRRMARGARKRRDRFVERRKELIAALIKYNLLPDDARERRALEVLDPYALRKTALTDTLPAHHVGRALFHLNQRRGFQSNRKTDSKQSEDGAIKQAASRLATDKGNETLGVFFADMHLRKSYEDRQTAIRAELVRLGKDHLTGNARKKIWAKVRKRLFGDEVLPRADAPHGVRARATITGTKASYDYYPTRDMLRDEFNAIWAGQSAHHATITDEARTEIEHIIFYQRPLKPAIVGKCTLDPATRPFKEDPEGYRAPWSHPLAQRFRILSEARNLEIRDTGKGSRRLTKEQSDLVVAALLANREVKFDKLRTLLKLPAEARFNLESDRRAALDGDQTAARLSDKKGFNKAWRGFPPERQIAIVARLEETEDENELIAWLEKECALDGAAAARVANTTLPDGHCRLGLRAIKKIVPIMQDGLDEDGVAGAGYHIAAKRAGYDHAKLPTGEQLGRLPYYGQWLQDAVVGSGDARDQKEKQYGQFPNPTVHIGLGQLRRVVNDLIDKYGPPTEISIEFTRALKLSEQQKAERQREQRRNQDKNKARAEELAKFGRPANPRNLLKMRLWEELAHDPLDRKCVYTGEQISIERLLSDEVDIDHILPVAMTLDDSPANKIICMRYANRHKRKQTPSEAFGSSPTLQGHRYNWDDIAARATGLPRNKRWRFDANAREEFDKRGGFLARQLNETGWLARLAKQYLGAVTDPNQIWVVPGRLTSMLRGKWGLNGLLPSDNYAGVQDKAEEFLASTDDMEFSGVKNRADHRHHAIDGLVTALTDRSLLWKMANAYDEEHEKFVIEPPWPTMRDDLKAALEKMVVSHKPDHGIEGKLHEDSAYGFVKPLDATGLKEEEAGNLVYRKAIESLNENEVDRIRDIQLRTIVRDHVNVEKTKGVALADALRQLQAPSDDYPQFKHGLRHVRILKKEKGDYLVPIANRASGVAYKAYSAGENFCVEVFETAGGKWDGEAVRRFDANKKNAGPKIAHAPQWRDANEGAKLVMRIHKGDLIRLDHEGRARIMVVHRLDAAAGRFKLADHNETGNLDKRHATNNDIDPFRWLMASYNTLKKLAAVPVRVDELGRVWRVMPN

SEQ ID NO: 40 - protein, 641 aa, Nitrobacter hamburgensis
MHKRNSRSYRLGLDLGSNSLGWFVTHLEKRGDRYEPVALDPGGVRIFPDGRDPQSGMSNAVDRRMARGARKRRDRFVDPYALRKAALTNALPAHRVGRAIFHLNQRRGFQSNRKTDRKQSEDGAIKQAASKLKARMHEEAAPTLGAFFADMHLRKSYDDQQTAIRAELVRLGKDHLTGNARKKVWAKVRKRLFGDEVLRPKDTSDGARARATTTGTKASYDFYPTRAMLLDEFNAIWAAQREHHLAMTDEAKAEIEHIIFYHRPLKPAIVGKCTLDPATRPFKEDPEGYRAPWSHPLAQRFRILSEARNLEIRETGKTSRRLTKDQSDLVVAALLANREVKFDKLRTLLKLPAEARFNLESDRRSTATRPPHGCRTRRASIRRGAGFLRNGRSRSSPDWKKPKTKTNCSHGSKWNAHLTAQRPRASPIRRCRTAIAGSACAQSKRSCRSCRTSSMRMALRAPAITSWPSVPATTIPVDTFQQGGNAFGRILSVVTIELFAITDRVDPVQEQDARCFALRIAECRSDGLQHFAEVSLGLPPRNAAQDQRHSAGLCQSSCVGRFVPGTPCRRTPRSTSLHGKEPSAHAFGSTARSRPQLPASPRPCMSFRDGTSSSPARMPETLDRCAISRSNRSSVCRAERL

SEQ ID NO: 41 - protein, 1368 aa, Streptococcus pyogenes
MDKKYSIGLDIGTNSVGWAVITDDYKVPSKKFKVLGNTDRHSIKKNLIGALLFDSGEIAEATRLKRTARRRYTRRKNRICYLQEIFSNEMAKVDDSFFHRLEESFLVEEDKKHERHPIFGNIVDEVAYHEKYPTIYHLRKKLVDSTDKADLRLIYLALAHMIKFRGHFLIEGDLNPDNSDVDKLFIQLVQTYNQLFEENPINASGVDAKAILSARLSKSRRLENLIAQLPGEKKNGLFGNLIALSLGLTPNFKSNFDLAEDAKLQLSKDTYDDDLDNLLAQIGDQYADLFLAAKNLSDAILLSDILRLNSEITKAPLSASMIKRYDEHHQDLTLLKALVRQQLPEKYKEIFFDQSKNGYAGYIDGGASQEEFYKFIKPILEKMDGTEELLAKLNREDLLRKQRTFDNGSIPHQIHLGELHAILRRQEDFYPFLKDNREKIEKILTFRIPYYVGPLARGNSRFAWMTRKSEETITPWNFEEVVDKGASAQSFIERMTNFDKNLPNEKVLPKHSLLYEYFTVYNELTKVKYVTEGMRKPAFLSGEQKKAIVDLLFKTNRKVTVKQLKEDYFKKIECFDSVEISGVEDRFNASLGTYHDLLKIIKDKDFLDNEENEDILEDIVLTLTLFEDREMIEERLKTYAHLFDDKVMKQLKRRRYTVWGRLSRKLINGIRDKQSGKTILDFLKSDGFANRNFMQLIHDDSLTFKEDIQKAQVSGQGDSLHEHIANLAGSPAIKKGILQTVKVVDELVKVMGRHKPENIVIEMARENQTTQKGQKNSRERMKRIEEGIKELGSQILKEHPVENTQLQNEKLYLYYLQNGRDMYVDQELDINRLSDYDVDHIVPQSFIKDDSIDNKVLTRSDKNRGKSDNVPSEEVVKKMKNYWRQLLNAKLITQRKFDNLTKAERGGLSELDKAGFIKRQLVETRQITKHVAQILDSRMNTKYDENDKLIREVKVITLKSKLVSDFRKDFQFYKVREINNYHHAHDAYLNAVVGTALIKKYPKLESEFVYGDYKVYDVRKMLAKSEQEIGKATAKYFFYSNIMNFFKTEITLANGEIRKRPLIETNGETGEIVWDKGRDFATVRKVLSMPQVNIVKKTEVQTGGFSKESILPKRNSDKLIARKKDWDPKKYGGFDSPTVAYSVLVVAKVEKGKSKKLKSVKELLGITIMERSSFEKNPIDFLEAKGYKEVRKDLIIKLPKYSLFELENGRKRMLASAGELQKGNELALPSKYVNFLYLASHYEKLKGSPEDNEQKQLFVEQHKHYLDEIIEQISEFSKRVILADANLDKVLSAYNKHRDKPIREQAENIIHLFTLTNLGAPTAFKYFDTTIDRKRYTSTKEVLDATFIHQSITGLYETRIDLSQLGGD

SEQ ID NO: 42 - protein, 1368 aa, Streptococcus pyogenes
MDKKYSIGLDIGTNSVGWAVITDDYKVPSKKFKVLGNTDRHSIKKNLIGALLFDSGETAEATRLKRTARRRYTRRKNRICYLQEIFSNEMAKVDDSFFHRLEESFLVEEDKKHERHPIFGNIVDEVAYHEKYPTIYHLRKKLVDSTDKADLRLIYLALAHMIKFRGHFLIEGDLNPDNSDVDKLFIQLVQTYNQLFEENPINASGVDAKAILSARLSKSRRLENLIAQLPGEKKNGLFGNLIALSLGLTPNFKSNFDLAEDAKLQLSKDTYDDDLDNLLAQIGDQYADLFLAAKNLSDAILLSDILRLNSEITKAPLSASMIKRYDEHHQDLTLLKALVRQQLPEKYKEIFFDQSKNGYAGYIDGGASQEEFYKFIKPILEKMDGTEELLAKLNREDLLRKQRTFDNGSIPHQIHLGELHAILRRQEDFYPFLKDNREKIEKILTFRIPYYVGPLARGNSRFAWMTRKSEETITPWNFEEVVDKGASAQSFIERMTNFDKNLPNEKVLPKHSLLYEYFTVYNELTKVKYVTEGMRKPAFLSGEQKKAIVDLLFKTNRKVTVKQLKEDYFKKIECFDSVEISGVEDRFNASLGTYHDLLKIIKDKDFLDNEENEDILEDIVLTLTLFEDREMIEERLKTYAHLFDDKVMKQLKRRRYTGWGRLSRKLINGIRDKQSGKTILDFLKSDGFANRNFMQLIHDDSLTFKEDIQKAQVSGQGDSLHEHIANLAGSPAIKKGILQTVKVVDELVKVMGRHKPENIVIEMARENQTTQKGQKNSRERMKRIEEGIKELGSQILKEHPVENTQLQNEKLYLYYLQNGRDMYVDQELDINRLSDYDVDHIVPQSFIKDDSIDNKVLTRSDKNRGKSDNVPSEEVVKKMKNYWRQLLNAKLITQRKFDNLTKAERGGLSELDKAGFIKRQLVETRQITKHVAQILDSRMNTKYDENDKLIREVKVITLKSKLVSDFRKDFQFYKVREINNYHHAHDAYLNAVVGTALIKKYPKLESEFVYGDYKVYDVRKMIAKSEQEIGKATAKYFFYSNIMNFFKTEITLANGEIRKRPLIETNGETGEIVWDKGRDFATVRKVLSMPQVNIVKKTEVQTGGFSKESILPKRNSDKLIARKKDWDPKKYGGFDSPTVAYSVLVVAKVEKGKSKKLKSVKELLGLTIMERSSFEKNPIDFLEAKGYKEVKKDLIIKLPKYSLFELENGRKRMLASAGELQKGNELALPSKYVNFLYLASHYEKLKGSPEDNEQKQLFVEQHKHYLDEIIEQISEFSKRVILADANLDKVLSAYNKHRDKPIREQAENIIHLFTLTNLGAPAAFKYFDTTIDRKRYTSTKEVLDATLIHQSITGLYETRIDLSQLGGD

SEQ ID NO: 43 - protein, 1368 aa, Streptococcus pyogenes
MDKKYSIGLDIGTNSVGWAVITDDYKVPSKKFKVLGNTDRHSIKKNLIGALLFDSGEIAEATRLKRTARRRYTRRKNRICYLQEIFSNEMAKVDDSFFHRLEESFLVEEDKKHERHPIFGNIVDEVAYHEKYPTIYHLRKKLVDSTDKADLRLIYLALAHMIKFRGHFLIEGDLNPDNSDVDKLFIQLVQTYNQLFEENPINASGVDAKAILSARLSKSRRLENLIAQLPGEKKNGLFGNLIALSLGLTPNFKSNFDLAEDAKLQLSKDTYDDDLDNLLAQIGDQYADLFLAAKNLSDAILLSDILRLNSEITKAPLSASMIKRYDEHHQDLTLLKALVRQQLPEKYKEIFFDQSKNGYAGYIDGGASQEEFYKFIKPILEKMDGTEELLAKLNREDLLRKQRTFDNGSIPHQIHLGELHAILRRQEDFYPFLKDNREKIEKILTFRIPYYVGPLARGNSRFAWMTRKSEETITPWNFEEVVDKGASAQSFIERMTNFDKNLPNEKVLPKHSLLYEYFTVYNELTKVKYVTEGMRKPAFLSGEQKKAIVDLLFKTNRKVTVKQLKEDYFKKIECFDSVEISGVEDRFNASLGTYHDLLKIIKDKDFLDNEENEDILEDIVLTLTLFEDREMIEERLKTYAHLFDDKVMKQLKRRRYTGWGRLSRKLINGIRDKQSGKTILDFLKSDGFANRNFMQLIHDDSLTFKEDIQKAQVSGQGDSLHEHIANLAGSPAIKKGILQTVKVVDELVKVMGRHKPENIVIEMARENQTTQKGQKNSRERMKRIEEGIKELGSQILKEHPVENTQLQNEKLYLYYLQNGRDMYVDQELDINRLSDYDVDHIVPQSFIKDDSIDNKVLTRSDKNRGKSDNVPSEEVVKKMKNYWRQLLNAKLITQRKFDNLTKAERGGLSELDKAGFIKRQLVETRQITKHVAQILDSRMNTKYDENDKLIREVKVITLKSKLVSDFRKDFQFYKVREINNYHHAHDAYLNAVVGTALIKKYPKLESEFVYGDYKVYDVRKMLAKSEQEIGKATAKYFFYSNIMNFFKTEITLANGEIRKRPLIETNGETGEIVWDKGRDFATVRKVLSMPQVNIVKKTEVQTGGFSKESILPKRNSDKLIARKKDWDPKKYGGFDSPTVAYSVLVVAKVEKGKSKKLKSVKELLGITIMERSSFEKNPIDFLEAKGYKEVRKDLIIKLPKYSLFELENGRKRMLASAGELQKGNELALPSKYVNFLYLASHYEKLKGSPEDNEQKQLFVEQHKHYLDEIIEQISEFSKRVILADANLDKVLSAYNKHRDKPIREQAENIIHLFTLTNLGAPTAFKYFDTTIDRKRYTSTKEVLDATFIHQSITGLYETRIDLSQLGGD

SEQ ID NO: 44 - protein, 1371 aa, Streptococcus pyogenes
MDKKYSIGLDIGTNSVGWAVITDDYKVPSKKFKVLGNTDRHSIKKNLIGALLFDSGETAEATRLKRTARRRYTRRKNRICYLQEIFSNEMAKVDDSFFHRLEESFLVEEDKKHERHPIFGNIVDEVAYHEKYPTIYHLRKKLADSTDKADLRLIYLALAHMIKFRGHFLIEGDLNPDNSDVDKLFIQLVQTYNQLFEENPINASRVDAKAILSARLSKSRRLENLIAQLPGEKKNGLFGNLIALSLGLTPNFKSNFDLAEDAKLQLSKDTYDDDLDNLLAQIGDQYADLFLAAKNLSDATLLSDILRVNSEITKAPLSASMIKRYDEHHQDLTLLKALVRQQLPEKYKEIFFDQSKNGYAGYIDGGASQEEFYKFIKPILEKMDGTEELLAKLNREDLLRKQRTFDNGSIPHQIHLGELHAILRRQEDFYPFLKDNREKIEKILTFRIPYYVGPLARGNSRFAWMTRKSEETITPWNFEEVVDKGASAQSFIERMTNFDKNLPNEKVLPKHSLLYEYFTVYNELTKVKYVTEGMRKPAFLSGEQKKAIVDLLFKTNRKVTVKQLKEDYFKKIECFDSVEISGVEDRFNASLGTYHDLLKIIKDKDFLDNEENEDILEDIVLTLTLFEDKEMIEERLKTYAHLFDDKVMKQLKRRHYTGWGRLSRKLINGIRDKQSGKTILDFLKSDGFANRNFIQLIHDDSLTFKEAIQKAQVSGQGHSLHEQIANLAGSPAIKKGILQSVKVVDELVKVMGHKPENIVIEMARENQTTQKGQKNSRERMKRIEEGIKELGSQILKEHPVENTQLQNEKLYLYYLQNGRDMYVDQELDINRLSDYDVDHIVPQSFIKDDSIDNKVLTRSDKNRGKSDDVPSEEVVKKMKNYWRQLLNAKLITQRKFDNLTKAERGGLSELDKAGFIKRQLVETRQITKHVAQILDSRMNTKYDENDKLIREVKVITLKSKLVSDFRKDFQFYKVREINNYHHAHDAYLNAVVGTALIKKYPKLESEFVYGDYKVYDVRKMIAKSEQEIGKATAKRFFYSNIMNFFKTEITLANGEIRKRPLIETNEETGEIVWDKGRDFATVRKVLSMPQVNIVKKTEVQTGALTNESIYARGSFDKLISRKHRFESSKYGGFGSPTVTYSVLVVAKSKVQDGKVKKIKTGKELIGITLLDKLVFEKNPLKFIEDKGYGNVQIDKCIKLPKYSLFEFENGTRRMLASVMANNNSRGDLQKANEMFLPAKLVTLLYHAHKIESSKELEHEAYILDHYNDLYQLLSYIERFASLYVDVEKNISKVKELFSNIESYSISEICSSVINLLTLTASGAPADFKFLGTTIPRKRYGSPQSILSSTLIHQSITGLYETRIDLSQLGSD

SEQ ID NO: 45 - protein, 1121 aa, Streptococcus thermophilus
MSDLVLGLDIGIGSVGVGILNKVTGEIIHKNSRIFPAAQAENNLVRRTNRQGRRLARRKKHRRVRLNRLFEESGLITDFTKISINLNPYQLRVKGLTDELSNEELFIALKNMVKHRGISYLDDASDDGNSSVGDYAQIVKENSKQLETKTPGQIQLERYQTYGQLRGDFTVEKDGKKHRLINVFPTSAYRSEALRILQTQQEFNPQITDEFINRYLEILTGKRKYYHGPGNEKSRTDYGRYRTSGETLDNIFGILIGKCTFYPDEFRAAKASYTAQEFNLLNDLNNLTVPTETKKLSKEQKNQIINYVKNEKAMGPAKLFKYIAKLLSCDVADIKGYRIDKSGKAEIHTFEAYRKMKTLETLDIEQMDRETLDKLAYVLTLNTEREGIQEALEHEFADGSFSQKQVDELVQFRKANSSIFGKGWHNFSVKLMMELIPELYETSEEQMTILTRLGKQKTTSSSNKTKYIDEKLLTEEIYNPVVAKSVRQAIKIVNAAIKEYGDFDNIVIEMARETNEDDEKKAIQKIQKANKDEKDAAMLKAANQYNGKAELPHSVFHGHKQLATKIRLWHQQGERCLYTGKTISIHDLINNSNQFEVDHILPLSITFDDSLANKVLVYATANQEKGQRTPYQALDSMDDAWSFRELKAFVRESKTLSNKKKEYLLTEEDISKFDVRKKFIERNLVDTRYASRVVLNALQEHFRAHKIDTKVSVVRGQFTSQLRRHWGIEKTRDTYHHHAVDALIIAASSQLNLWKKQKNTLVSYSEDQLLDIETGELISDDEYKESVFKAPYQHFVDTLKSKEFEDSILFSYQVDSKFNRKISDATIYATRQAKVGKDKADETYVLGKIKDIYTQDGYDAFMKIYKKDKSKFLMYRHDPQTFEKVIEPILENYPNKQINEKGKEVPCNPFLKYKEEHGYIRKYSKKGNGPEIKSLKYYDSKLGNHIDITPKDSNNKVVLQSVSPWRADVYFNKTTGKYEILGLKYADLQFEKGTGTYKISQEKYNDIKKKEGVDSDSEFKFTLYKNDLLLVKDTETKEQQLFRFLSRTMPKQKHYVELKPYDKQKFEGGEALIKVLGNVANSGQCKKGLGKSNISIYKVRTDVLGNQHIIKNEGDKPKLDF

SEQ ID NO: 46 - protein, 1388 aa, Streptococcus thermophilus
MTKPYSIGLDIGTNSVGWAVTTDNYKVPSKKMKVLGNTSKKYIKKNLLGVLLFDSGITAEGRRLKRTARRRYTRRRNRILYLQEIFSTEMATLDDAFFQRLDDSFLVPDDKRDSKYPIFGNLVEEKAYHDEFPTIYHLRKYLADSTKKADLRLVYLALAHMIKYRGHFLIEGEFNSKNNDIQKNFQDFLDTYNAIFESDLSLENSKQLEEIVKDKISKLEKKDRILKLFPGEKNSGIFSEFLKLIVGNQADFRKCFNLDEKASLHFSKESYDEDLETLLGYIGDDYSDVFLKAKKLYDAILLSGFLTVTDNETEAPLSSAMIKRYNEHKEDLALLKEYIRNISLKTYNEVFKDDTKNGYAGYIDGKTNQEDFYVYLKKLLAEFEGADYFLEKIDREDFLRKQRTFDNGSIPYQIHLQEMRAILDKQAKFYPFLAKNKERIEKILTFRIPYYVGPLARGNSDFAWSIRKRNEKITPWNFEDVIDKESSAEAFINRMTSFDLYLPEEKVLPKHSLLYETFNVYNELTKVRFIAESMRDYQFLDSKQKKDIVRLYFKDKRKVTDKDIIEYLHAIYGYDGIELKGIEKQFNSSLSTYHDLLNIINDKEFLDDSSNEAIIEEIIHTLTIFEDREMIKQRLSKFENIFDKSVLKKLSRRHYTGWGKLSAKLINGIRDEKSGNTILDYLIDDGISNRNFMQLIHDDALSFKKKIQKAQIIGDEDKGNIKEVVKSLPGSPAIKKGILQSIKIVDELVKVMGGRKPESIVVEMARENQYTNQGKSNSQQRLKRLEKSLKELGSKILKENIPAKLSKIDNNALQNDRLYLYYLQNGKDMYTGDDLDIDRLSNYDIDHIIPQAFLKDNSIDNKVLVSSASNRGKSDDVPSLEVVKKRKTFWYQLLKSKLISQRKFDNLTKAERGGLSPEDKAGFIQRQLVETRQITKHVARLLDEKFNNKKDENNRAVRTVKIITLKSTLVSQFRKDFELYKVREINDFHHAHDAYLNAVVASALLKKYPKLEPEFVYGDYPKYNSFRERKSATEKVYFYSNIMNIFKKSISLADGRVIERPLIEVNEETGESVWNKESDLATVRRVLSYPQVNVVKKVEEQNHGLDRGKPKGLFNANLSSKPKPNSNENLVGAKEYLDPKKYGGYAGISNSFTVLVKGTIEKGAKKKITNVLEFQGISILDRINYRKDKLNFLLEKGYKDIELIIELPKYSLFELSDGSRRMLASILSTNNKRGEIHKGNQIFLSQKFVKLLYHAKRISNTINENHRKYVENHKKEFEELFYYILEFNENYVGAKKNGKLLNSAFQSWQNHSIDELCSSFIGPTGSERKGLFELTSRGSAADFEFLGVKIPRYRDYTPSSLLKDATLIHQSVTGLYETRIDLAKLGEG

SEQ ID NO: 47 - protein, 1138 aa, Acidothermus cellulolyticus
MGGSEVGTVPVTWRLGVDVGERSIGLAAVSYEEDKPKEILAAVSWIHDGGVGDERSGASRLALRGMARRARRLRRFRRARLRDLDMLLSELGWTPLPDKNVSPVDAWLARKRLAEEYVVDETERRRLLGYAVSHMARHRGWRNPWTTIKDLKNLPQPSDSWERTRESLEARYSVSLEPGTVGQWAGYLLQRAPGIRLNPTQQSAGRRAELSNATAFETRLRQEDVLWELRCIADVQGLPEDVVSNVIDAVFCQKRPSVPAERIGRDPLDPSQLRASRACLEFQEYRIVAAVANLRIRDGSGSRPLSLEERNAVIEALLAQTERSLTWSDIALEILKLPNESDLTSVPEEDGPSSLAYSQFAPFDETSARIAEFIAKNRRKIPTFAQWWQEQDRTSRSDLVAALADNSIAGEEEQELLVHLPDAELEALEGLALPSGRVAYSRLTLSGLTRVMRDDGVDVHNARKTCFGVDDNWRPPLPALHEATGHPVVDRNLAILRKFLSSATMRWGPPQSIVVELARGASESRERQAEEEAARRAHRKANDRIRAELRASGLSDPSPADLVRARLLELYDCHCMYCGAPISWENSELDHIVPRTDGGSNRHENLAITCGACNKEKGRRPFASWAETSNRVQLRDVIDRVQKLKYSGNMYWTRDEFSRYKKSVVARLKRRTSDPEVIQSIESTGYAAVALRDRLLSYGEKNGVAQVAVFRGGVTAEARRWLDISIERLFSRVAIFAQSTSTKRLDRRHHAVDAVVLTTLTPGVAKTLADARSRRVSAEFWRRPSDVNRHSTEEPQSPAYRQWKESCSGLGDLLISTAARDSIAVAAPLRLRPTGALHEETLRAFSEHTVGAAWKGAELRRIVEPEVYAAFLALTDPGGRFLKVSPSEDVLPADENRHIVLSDRVLGPRDRVKLFPDDRGSIRVRGGAAYIASFHHARVFRWGSSHSPSFALLRVSLADLAVAGLLRDGVDVFTAELPPWTPAWRYASIALVKAVESGDAKQVGWLVPGDELDFGPEGVTTAAGDLSMFLKYFPERHWVVTGFEDDKRINLKPAFLSAEQAEVLRTERSDRPDTLTEAGEILAQFFPRCWRATVAKVLCHPGLTVIRRTALGQPRWRRGHLPYSWRPWSADPWSGGTP

SEQ ID NO: 48 - protein, 1629 aa, Francisella novicida
MNFKILPIAIDLGVKNTGVFSAFYQKGTSLERLDNKNGKVYELSKDSYTLLMNNRTARRHQRRGIDRKQLVKRLFKLIWTEQLNLEWDKDTQQAISFLFNRRGFSFITDGYSPEYLNIVPEQVKAILMDIFDDYNGEDDLDSYLKLATEQESKISEIYNKLMQKILEFKLMKLCTDIKDDKVSTKTLKEITSYEFELLADYLANYSESLKTQKFSYTDKQGNLKELSYYHHDKYNIQEFLKRHATINDRILDTLLTDDLDIWNFNFEKFDFDKNEEKLQNQEDKDHIQAHLHHFVFAVNKIKSEMASGGRHRSQYFQEITNVLDENNHQEGYLKNFCENLHNKKYSNLSVKNLVNLIGNLSNLELKPLRKYFNDKIHAKADHWDEQKFTETYCHWILGEWRVGVKDQDKKDGAKYSYKDLCNELKQKVTKAGLVDFLLELDPCRTIPPYLDNNNRKPPKCQSLILNPKFLDNQYPNWQQYLQELKKLQSIQNYLDSFETDLKVLKSSKDQPYFVEYKSSNQQIASGQRDYKDLDARILQFIFDRVKASDELLLNEIYFQAKKLKQKASSELEKLESSKKLDEVIANSQLSQILKSQHTNGIFEQGTFLHLVCKYYKQRQRARDSRLYIMPEYRYDKKLHKYNNTGRFDDDNQLLTYCNHKPRQKRYQLLNDLAGVLQVSPNFLKDKIGSDDDLFISKWLVEHIRGFKKACEDSLKIQKDNRGLLNHKINIARNTKGKCEKEIFNLICKIEGSEDKKGNYKHGLAYELGVLLFGEPNEASKPEFDRKIKKFNSIYSFAQIQQIAFAERKGNANTCAVCSADNAHRMQQIKITEPVEDNKDKIILSAKAQRLPAIPTRIVDGAVKKMATILAKNIVDDNWQNIKQVLSAKHQLHIPIITESNAFEFEPALADVKGKSLKDRRKKALERISPENIFKDKNNRIKEFAKGISAYSGANLTDGDFDGAKEELDHIIPRSHKKYGTLNDEANLICVTRGDNKNKGNRIFCLRDLADNYKLKQFETTDDLEIEKKIADTIWDANKKDFKFGNYRSFINLTPQEQKAFRHALFLADENPIKQAVIRAINNRNRTFVNGTQRYFAEVLANNIYLRAKKENLNTDKISFDYFGIPTIGNGRGIAEIRQLYEKVDSDIQAYAKGDKPQASYSHLIDAMLAFCIAADEHRNDGSIGLEIDKNYSLYPLDKNTGEVFTKDIFSQIKITDNEFSDKKLVRKKAIEGFNTHRQMTRDGIYAENYLPILIHKELNEVRKGYTWKNSEEIKIFKGKKYDIQQLNNLVYCLKFVDKPISIDIQISTLEELRNILTTNNIAATAEYYYINLKTQKLHEYYIENYNTALGYKKYSKEMEFLRSLAYRSERVKIKSIDDVKQVLDKDSNFIIGKITLPFKKEWQRLYREWQNTTIKDDYEFLKSFFNVKSITKLHKKVRKDFSLPISTNEGKFLVKRKTWDNNFIYQILNDSDSRADGTKPFIPAFDISKNEIVEAIIDSFTSKNIFWLPKNIELQKVDNKNIFAIDTSKWFEVETPSDLRDIGIATIQYKIDNNSRPKVRVKLDYVIDDDSKINYFMNHSLLKSRYPDKVLEILKQSTIIEFESSGFNKTIKEMLGMKLAGIYNETSNN

SEQ ID NO: 49 - protein, 1068 aa, Verminephrobacter eiseniae
MNKAVAYRLALDLGSTSLGWAIFRLNEAREPTAIIRAGVRIFSDGRNANSEPLAVHRRVARAMRRRRDRLLKRKKRMHDQLVQHGFFPAEVAERKELERLNPYQLRAKGLHEALTPGEFARALFHINQRRGFKSNRKTDRKDNDSGALKQAISELRKRIQDSDCATAGEWFWKERMQQKPEGVRGQWVRARYRKTPSTTDEGKKRIGYDLYVDRAMVEQEFDALWAAQAALQPGLFTEAARAELKDTLLYQRDLRPVKPGRCTLLPAEERAPLALPSTQRFRILQEVNNLRLLDEALREVPLNLAQRDAVVSALEGKKELSFAAIRKLLTLSGKFNLEDEKRAELKGNATSVILARKDLFGDAWAGFDAAVQDEIVWRLVSQESEGALIAWLQQHTGVDGVCAEAIVNTRLPDGYGRLSRKALERIVPALQREVCTYDKAVQAAGFAHHSDLGFDFDYAEDEVQQVGEHTIASTGEVQAQYAFKQLPYYGKALQRHVAFGSGDAKDHEEKCYGKIANPTVHIGLNQVRTVVNALIRRYGHPTEVVVELARDLKQSREQKQQTQREQADNQKRNEDIRKRIAPILETSPERVRDRDIKKWILWEELNKKDIADRHCPYSGERISATMLLSEAVEIEHILPFSRTLDDSLNNRTVAMRRANRIKGDRTPWEARADFEAQGWRYEAILQRAEGMPPRKRYRFAEDGYQRWLGKDRNFLARALNDTSYLSRLAANYLRLVCPQGVRVIPGQMTDKLRGKFGLNSVLGLDGKKNRNDHRHHAVDACVIGVTDQGLMQRFANASKQARENGLTRLVQDMLLPWWPSYYDHVERAVRHIRVSHRPDHGFEGAMMKGTAHGIREDGIREDGRIKQRPKAKGSADHKTITLIPIDEPRQLARHGVDAEGKPLPYKGYASGSNYCIEITKNGKGKWEGQVISTFDAYRIKAAADAAARAGQVISTVEADSIVRKSGWERLRGAQSQNGQPLVMRLVIGDSVRMEVDGRDEVMRVVKMSGKEMVFAPVREANVDKRNNMPDEQDPFTYTYKRADQLRKAKARQVTISPIGELRDPGFKG

SEQ ID NO: 50 - protein, 1125 aa, Francisella tularensis
MNVKILPIAIDLDVKNTGVFSAFYQKGTSLEKLDNKNGKVYELSKDSYTLLMNNRTARRHQRRGIDRKQLVKRLFKLVWTEQLNLEWDKDTQQAISFLFNRRGFSFITDGYSTEYLNIVPEQVKAILMDIFDDYNGEDDLDSYLKLATEQESKISEIYNKLMQKILEFKLRKLCTDIKDDKVSTKTLKEITSYEFELLADYLANYSESLKIQKFSYTDKQGNLKELSYYHHDKYNIQEFLKRHATINDEILDTLLTDDFDIWNFNFEKFDFDKNEEKLQNQEDKDHTQAHLHHFVFAVNKIKSEMASGGRHRSQYFQEITNVLDENNHQEGYLKNFCENLHNKKYSNLSVKNLVNLVGNLSNLELKPLRKYFNDKIHAKADHWDEQKFTETYCHWILGEWRVGVKDQDKKDGAKYSYKDLCNELKQKVTKAGLIDFLLELDPCRTIPPYLDNNNRKPPKCQSLILNPKFLDNQYPNWQQYLQELKKLQSIQDYLDSFETDLKDLKSSKDQPYFVEYKSSNQQMASGQRDYKDLDARILQFIFDRVKASDELLLNEIYFQAKKLKQKASSELEKLESSKKLDEVIANSQLSQILKSQHTNGIFEQGTFLHLVCKYYKQRQRARDSRLYIMPEYRYDKKLDKYNNTGRFDDNNQLLTYCNHKPRQKRYQLLNDLAGVLQVSRNQLLSSVEEWFQQAQRVGEISKSQDEQIFEWLKSFKIASYCKAAVEMQKQYRGTLKNAIQTAIFRQSENINKNKNKNTGNQQQALSENSKDVKSLTADEKKLLKLIENIAKASQKIGESLGLNDKQIKKFNSIYSFAQIQQIAFAERKGNANTCAVCSADNAHRMQQIKITELVEDNKDNIILSAKAQRLPAIPTRIVDGAVKKMATILAKNIVDDNWQNIKQVLSAKHQLHIPIITESNAFEFEPALADVKGKSLKDRRKKALERISPENIFKDKNNRIKEFAKGISAYSGANLTDGDFDGAKEELDHIIPRSHKKYGTLNDEANLICVTRDDNKNIFAIDTSKWFEIETPSDLRDIGVATIQYKIDNNSRPKVRVKLDYVIDDDSKINYFMNHSLLKSRYPDKVLEILKQSTIIEFESSGFNKTIKEMLGMTLAGIYNETSNN

SEQ ID NO: 51 - protein, 1064 aa, Bradyrhizobium sp.
MKRTSLRAYRLGVDLGANSLGWFVVWLDDHGQPEGLGPGGVRIFPDGRNPQSKQSNAAGRRLARSARRRRDRYLQRRGKLMGLLVKHGLMPADEPARKRLECLDPYGLRAKALDEVLPLHHVGRALFHLNQRRGLFANRAIEQGDKDASAIKAAAGRLQTSMQACGARTLGEFLNRRHQLRATVRARSPVGGDVQARYEFYPTRAMVDAEFEAIWAAQAPHHPTMTAEAHDTIREAIFSQRAMKRPSIGKCSLDPATSQDDVDGFRCAWSHPLAQRFRIWQDVRNLAVVETGPTSSRLGKEDQDKVARALLQTDQLSFDEIRGLLGLPSDARFNLESDRRDHLKGDATGAILSARRHFGPAWHDRSLDRQIDIVALLESALDEAAIIASLGTTHSLDEAAAQRALSALLPDGYCRLGLRAIKRVLPLMEAGRTYAEAASAAGYDHALLPGGKLSPTGYLPYYGQWLQNDVVGSDDERDTNERRWGRLPNPTVHIGIGQLRRVVNELIRWHGPPAEITVELTRDLKLSPRRLAELEREQAENQRKNDKRTSLLRKLGLPASTHNLLKLRLWDEQGDVASECPYTGEAIGLERLVSDDVDIDHLIPFSISWDDSAANKVVCMRYANREKGNRTPFEAFGHRQGRPYDWADIAERAARLPRGKRWRFGPGARAQFEELGDFQARLLNETSWLARVAKQYLAAVTHPHRIHVLPGRLTALLRATWELNDLLPGSDDRAAKSRKDHRHHAIDALVAALTDQALLRRMANAHDDTRRKIEVLLPWPTFRIDLETRLKAMLVSHKPDHGLQARLHEDTAYGTVEHPETEDGANLVYRKTFVDISEKEIDRIRDRRLRDLVRAHVAGERQQGKTLKAAVLSFAQRRDIAGHPNGIRHVRLTKSIKPDYLVPIRDKAGRIYKSYNAGENAFVDILQAESGRWIARATTVFQANQANESHDAPAAQPIMRVFKGDMLRIDHAGAEKFVKIVRLSPSNNLLYLVEHHQAGVFQTRHDDPEDSFRWLFASFDKLREWNAELVRIDTLGQPWRRKRGLETGSEDATRIGWTRPKKWP

SEQ ID NO: 52 - protein, 1354 aa, Flavobacterium psychrophilum
MKKILGLDLGTNSIGWAFINEAENEIEVSSIVNTGVRIVPLTTDEESDFKKGNTISINADRTLKRGARRGLQRFKQRREALLETFNRIKFIATDFVYAETGAATTFSSYQLRAKSAVEAVTKEELVKVLLMLNKKRGYKSSRKAKTAEEGDAIDGMKIAKEIFENNLTPGQWVYNSLSKGGKFIPDFYHSDLQKELEKIVRFQNQFHSEQINDKLLADIQGKSRTQTSQHFSKTLNIPLAENKGTREETKLQHYQWRNEALANELDMKILAFIITEINNQINQSSGYLGAISDRSKELYFNQETVGQYQYKQLQENVHAKLKNQVFYRQDYLDEFEKIWETQAKFHSELNEKLKAEIRDITIFYQRKLKSQKHLVSFCEFEKGHKAIPKSSPLFQEFRIWQNLNNVVVKNETTKEVFELSEELKQLIAEELQFKESMTDVQMLTFCELKKGTHTVNFKKIEGNRTNTSIYKAFEKILEVEGYEIDFSKMKPLEIKETVAPIFETLNINTVILDFDPTIQGNDFDKQPYYQLWHLLYSAEDDDKLKETLKTKFGFKENHLPFILNINLQADYGSLSAKAIKKILPHLMDGHIYDKACLMVGYNHSSSLTTAQNNDRVLKDTLELLKKNSLRNPVVEKILNQMINVINAIMKDPAMGKPDEIRVELARELKANNEQRKKATSDINTATTEHERIRKLLHSEFNIPRVTRNDIIRYKLWLETGGISLYTGNPIKASDLFSKNYDIEHIIPKSRLFDDSFSNKTLCERQLNIDKSNKTAYSFLQEKLSENDFAAYENRVKDLFKTGKIKSYTKYKKLLMADNEIPEGFIDRQLRETQYIAKKAKEILLEVSRNVTATIGSVTDKLRQDWELVDVMKELNWEKYDKLGLTHIEEGKNGERLSKIKDWTKRNDHRHHAMDAITVAFTKPAYIQYLNNLNAKTQGENKANSIIGIENKHLYRDKNNKLRFISPMKNFREEAKKQLESILISYKAKNKVVTKNKNTTKKSGGTNQKIQLTPRGRLHKETVYGKLQQYATKEEKVNASFTEDYIQKVAKKEYREALLKRLEENDNDPKKAFTGKNALNKTPIYISLKDNIIVPEKVKTVWLETDYTIRKDITPDLKIDKVIDVGIKRILQNRLNEFNGDPKKAFVNLGESPIWLNKEKGIAIKRVTISGVSNAQALHTKKDHLGNEILDKNGNPIPVDFISTGNNHHVAIYRDEKGNLQEEVVSFYDAVIRRNLGLSVINKNHEKGWEFLFSMKQNEFFIFPSDGFNPHEIDLLNPNNYHLISPNIFRVQKISTKNYMFNHHLETKAVDGEMLKSKKELSKTSYHFIQTPTNLNGIIKVRINHLGKIVHLGEY

SEQ ID NO: 53 - protein, 1062 aa, Actinobacillus succinogenes
MNLNYILGLDLGIASVGWAVVEIDEQENPQRLIDVGVRTFDRAEVLKTGESLALARRLARSSRRLVKRRAERIKKAKRLLKAENLLLSADEILPNEAWQLRVKGLDQKLERQEWAAVLLHLLKHRGYLSQRKNESKSENKELGALLSGVAINHQILQSAEYRTPAEIAVNKFQAEEGHIRNQRGAYTHTFSRLDLLAEMELLFQRQATLGNPHTSTKLLENLTALLMWQKPALAGEAILKMLGKCTFEPTEYKAAKNSYSAERFVWLTKLNNLRILEQGAERALTDNERFALLDQPYEKAKLTYAQVRTLLGLSDEAIFKGLRYQGEDKKAVETKTTLMEVKAYHQIRKALEGLDLKAEWNELKNNPALLDEIGTAFSLYKTDDDIHRYLDGKLSESVLNALLENLNFDKFIQLSLKALQQILPLMLQGQRYDEAVSAIYGDHYGKKSDEIDRLLPNIPTDEIRNPVVLRTLTQARKVINAVVRLYGSPARIHIETGREVGKSYQDRKKLEKQQEENRKQRENAVKKFKEYFPNFVGEPKGKDILKMRLYELQQAKCLYSGKSLELYRLLEKGYVEVDHALPFSRTWDDSFNNKVLVLANENQNKGNATPYEWLDGKNNSEGWQHFVARVQTSGFSYAKKQRVLIQELDEKSFIERNLNDTRYVARFLCNHIADNMLLTGKGKRKVFASNGQITALLRGCWGLQKVRENNDRHHALDAVVVACSTKSMQDKITKFVKYKEGRLFKDKKDGVYKGERINRETGEIISLHFPTPWKFFKENVEIRIFSENPKLELENRLPDYPQYNHEFVQPLFVSRMPTRKMTGQGHMETVKSAKRLDKGLSVLKVPLTQLKLSDLERMVNREREMALYEALKECLEQFGNDPAKAFAEPFYKKGGALVKAVRVEQTQKSGVLVRNGNGVADNATGSIVRVDVFTKGGKYFLVPIYTWQVAKGILPNKAVIQGKDESEWEEMDENAVFQFSMHKNDLIKVKTKKGEIFGYFNGLDRATGSIEIEEHDLEKSKGKNGSHRGLGVKTAFFLEKYQVDELGKNIRPCRPTKRQHVR

SEQ ID NO: 54 - protein, 1340 aa, Dorea longicatena
MEQEYYLGLDMGTGSVGWAVTDSEYHVLRKHGKALWGVRLFESASTAEERRMFRTSRRRLDRRNWRIEILQEIFAEEISKKDPGFFLRMKESKYYPEDKRDINGNCPELPYALFVDDDFTDKDYHKKFPTIYHLRKMLMNTEETPDIRLVYLAIHHMMKHRGHFLLSGDINEIKEFGTTFSKLLENIKNEELDWNLELGKEEYAVVESILKDNMLNRSTKKTRLIKALKAKSICEKAVLNLLAGGTVKLSDIFGLEELNETERPKISFADNGYDDYIGEVENELGEQFYIIETAKAVYDWAVLVEILGKYTSISEAKVATYEKHKSDLQFLKKIVRKYLTKEEYKDIFVSTSDKLKNYSAYIGMTKINGKKVDLQSKRCSKEEFYDFIKKNVLKKLEGQPEYEYLKEELERETFLPKQVNRDNGVIPYQIHLYELKKILGNLRDKIDLIKENEDKLVQLFEFRIPYYVGPLNKIDDGKEGKFTWAVRKSNEKIYPWNFENVVDIEASAEKFIRRMTNKCTYLMGEDVLPKDSLLYSKYMVLNELNNVKLDGEKLSVELKQRLYTDVFCKYRKVTVKKIKNYLKCEGIISGNVEITGIDGDFKASLTAYHDFKEILTGTELAKKDKENIITNIVLFGDDKKLLKKRLNRLYPQITPNQLKKICALSYTGWGRFSKKFLEEITAPDPETGEVWNIITALWESNNNLMQLLSNEYRFMEEVETYNMGKQTKTLSYETVENMYVSPSVKRQIWQTLKIVKELEKVMKESPKRVFIEMAREKQESKRTESRKKQLIDLYKACKNEEKDWVKELGDQEEQKLRSDKLYLYYTQKGRCMYSGEVIELKDLWDNTKYDIDHIYPQSKTMDDSLNNRVLVKKKYNATKSDKYPLNENIRHERKGFWKSLLDGGFISKEKYERLIRNTELSPEELAGFIERQIVETRQSTKAVAEILKQVFPESEIVYVKAGTVSRFRKDFELLKVREVNDLHHAKDAYLNIVVGNSYYVKFTKNASWFIKENPGRTYNLKKMFTSGWNIERNGEVAWEVGKKGTIVTVKQIMNKNNILVTRQVHEAKGGLFDQQIMKKGKGQIAIKETDERLASIEKYGGYNKAAGAYFMLVESKDKKGKTIRTIEFIPLYLKNKIESDESIALNFLEKGRGLKEPKILLKKIKIDTLFDVDGFKMWLSGRTGDRLLFKCANQLILDEKIIVTMKKIVKFIQRRQENRELKLSDKDGIDNEVLMEIYNTFVDKLENTVYRIRLSEQAKTLIDKQKEFERLSLEDKSSTLFEILHIFQCQSSAANLKMIGGPGKAGILVMNNNISKCNKISIINQSPTGIFENEIDLLKI

SEQ ID NO: 55 - protein, 984 aa, Campylobacter jejuni
MAKILAFDIGISSIGWAFSENDELKDCGVRIFTKAENPKTGESLALPRRIARSARKRLARRKARLNHLKHLIANEFKLNYEDYQSFDEILAKAYKGSLISPYELRFRALNELLSKQDFARVILHIAKRRGYDDIKNNGDEEKGKILKAIKQNEEKLANYQSVGEYLYKEYFQKFKENSKEFINVRNKKESYERCIAQSFLKDELKLIFKKQREFGFSFSKKFEEEVLSVAFYKRALKDFSHLVGNCSFFTDEKRAPKNSPLAFMFVALTRIINLLNNLKNTLYTKDDLNALLNEVLKNGTLTYKQTKKLLGLSDDYEFKGEKGNYFIEFKKYKEFIKALGEHSLSQDDLNEIAKDITLIKDEIKLKKALAKYDLNENQIDNLSKLEFKDHLNISFKALKLITPLMLEGKKYDEACNELTLKVAINEDKKDFLPAFNETYYKDEVTNPVVLRAIKEYRKVLNALLKKYGKVHKINIELAREVGKNHSQRAKIEKEQNENYKAKKDAELECEKLGLKINSKNILKLRLFKEQKEFCVYSGEKIKLSDLQDEKMLEIDHIYPYSRSFDDSYMNKVLVFTKQNQEKLNQTPFEAFGNDSAKWQKIEVLAKNLPTKKQKRILDKNYKDKEQKDFKDRNLNDTRYIARLVLNYTKDYLDFLPLSDDENTKLNDTQKGSKVHVEAKSGMLTSALRHTWGFSTKDRNNHLHHAIDAVIIAYANNSIVKAFSDFKKEQESNTAELYAKKISELDYKNKRKFFEPFSGFRQKVLDKIDEIFVSKPERKKPSGALHEETFRKEEEFYQSYGGKEGVLKALELGKIRKVNGKIVKNGDMFRVDIFKHKKTNKFYAVPIYTMDFALKVLPNKAVARSKKGEIKDWILMDENYEFCFSLYKDSLILIQTKDMQEPEFVYYNAFTSSTVSLIVSKHDNKFETLSKNQKILFKNANEKEVIAKSIGIQNLKVFEKYIVSALGEVTKAEFRQREEFKNELR

SEQ ID NO: 56 - protein, 1037 aa, Parvibaculum lavamentivorans
MERIFGFDIGTTSIGFSVIDYSSTQSAGNIQRLGVRIFPEARDPDGTPLNQQRRQKRMMRRQLRRRRIRRKALNETLHEAGFLPAYGSADWPVVMADEPYELRRRGLEEGLSAYEFGRAIYHLAQHRHFKGRELEESDTPDPDVDDEKEAANERAATLKALKNEQTTLGAWLARRPPSDRKRGIHAHRNVVAEEFERLWEVQSKFHPALKSEEMRARISDTIFAQRPVFWRKNTLGECRFMPGEPLCPKGSWLSQQRRMLEKLNNLAIAGGNARPLDAEERDAILSKLQQQASMSWPGVRSALKALYKQRGEPGAEKSLKFNLELGGESKLLGNALEAKLADMFGPDWPAHPRKQEIRHAVHERLWAADYGETPDKKRVIILSEKDRKAHREAAANSFVADFGITGEQAAQLQALKLPTGWEPYSIPALNLFLAELEKGERFGALVNGPDWEGWRRTNFPHRNQPTGEILDKLPSPASKEERERISQLRNPTVVRTQNELRKVVNNLIGLYGKPDRIRIEVGRDVGKSKREREEIQSGIRRNEKQRKKATEDLIKNGIANPSRDDVEKWILWKEGQERCPYTGDQIGFNALFREGRYEVEHIWPRSRSFDNSPRNKTLCRKDVNIEKGNRMPFEAFGHDEDRWSAIQIRLQGMVSAKGGTGMSPGKVKRFLAKTMPEDFAARQLNDTRYAAKQILAQLKRLWPDMGPEAPVKVEAVTGQVTAQLRKLWTLNNILADDGEKTRADHRHHAIDALTVACTHPGMTNKLSRYWQLRDDPRAEKPALTPPWDTIRADAEKAVSEIVVSHRVRKKVSGPLHKETTYGDTGTDIKTKSGTYRQFVTRKKIESLSKGELDEIRDPRIKEIVAAHVAGRGGDPKKAFPPYPCVSPGGPEIRKVRLTSKQQLNLMAQTGNGYADLGSNHHIAIYRLPDGKADFEIVSLFDASRRLAQRNPIVQRTRADGASFVMSLAAGEAIMIPEGSKKGIWIVQGVWASGQVVLERDTDADHSTTTRPMPNPILKDDAKKVSIDPIGRVRPSND

SEQ ID NO: 57 - protein, 1107 aa, Eubacterium ventriosum
MGYTVGLDIGVASVGVAVLDENDNIVEAVSNIFDEADTSNNKVRRTLREGRRTKRRQKTRIEDFKQLWETSGYIIPHKLHLNIIELRNKGLTELLSLDELYCVLLSMLKHRGISYLEDADDGEKGNAYKKGLAFNEKQLKEKMPCEIQLERMKKYGKYHGEFIIEINDEKEYQSNVFTTKAYKKELEKIFETQRCNGNKINTKFIKKYMEIYERKREYYIGPGNEKSRTDYGIYTTRTDEEGNFIDEKNIFGKLIGKCSVYPEEYRASSASYTAQEFNLLNDLNNLKINNEKLTEFQKKEIVEIIKDASSVNMRKIIKKVIDEDIEQYSGARIDKKGKEIYHTFEIYRKLKKELKTINVDIDSFTREELDKTMDILTLNTERESIVKAFDEQKFVYEENLIKKLIEFRKNNQRLFSGWHSFSYKAMLQLIPVMYKEPKEQMQLLTEMNVFKSKKEKYVNYKYIPENEVVKEIYNPVVVKSIRTTVKILNALIKKYGYPESVVIEMPRDKNSDDEKEKIDMNQKKNQEEYEKILNKIYDEKGIEITNKDYKKQKKLVLKLKLWNEQEGLCLYSGKKIAIEDLLNHPEFFEIDHIIPKSISLDDSRSNKVLVYKTENSIKENDTPYHYLTRINGKWGFDEYKANVLELRRRGKIDDKKVNNLLCMEDITKIDVVKGFINRNLNDTRYASRVVLNEMQSFFESRKYCNTKVKVIRGSLTYQMRQDLHLKKNREESYSHHAVDAMLIAFSQKGYEAYRKIQKDCYDFETGEILDKEKWNKYIDDDEFDDILYKERMNEIRKKIIEAEEKVKYNYKIDKKCNRGLCNQTIYGTREKDGKIHKISSYNIYDDKECNSLKKMINSGKGSDLLMYNNDPKTYRDMLKILETYSSEKNPFVAYNKETGDYFRKYSKNHNGPKVEKVKYYSGQINSCIDISHKYGHAKNSKKVVLVSLNPYRTDVYYDNDTGKYYLVGVKYNHIKCVGNKYVIDSETYNELLRKEGVLNSDENLEDLNSKNITYKFSLYKNDIIQYEKGGEYYTERFLSRIKEQKNLIETKPINKPNFQRKNKKGEWENTRNQIALAKTKYVGKLVTDVLGNCYIVNMEKFSLVVDK

SEQ ID NO: 58 - protein, 1136 aa, Streptococcus gordonii
MNGLVLGLDIGIASVGVGILEKDTGKIIHASSRLFPAATADNNVERRSNRQGRRLNRRKKHRSVRLQDLFEGYGLLTDFSKVSMNLNPYQLRVQGMENQLTNEELFVALKNIVKRRGISYLDDASEDGGTVSSDYGKAVEENRKLLAEKTPGQIQLERFEKYGQLRGDFTVEENGEKHRLINVFSTSAYRKEAERILRKQQEFNSKITDEFIEDYLIILTGKRKYYHGPGNEKSRTDYGRFRTDGTTLDNIFGILIGKCTFYTEEYRASKASYTAQEFNLLNDLNNLTVPTETKKLSEEQKKLIIEYAKSAKTLGASTLLKYIAKMIDASVDQIRGYRVDVNNKPEMHTFEVYRKMQSLETIKVEELPRKVLDELAHILTLNTEREGIEEAINSKLKDIFNRDQVLELVQFRKNNSSLFSKGWHNFSIKLMMELIPELYETSEEQMTILTRLGKQRSKETSKRTKYIDEKELTEEIYNPVVAKSVRQAIKIINEATKKYGIFDNIVIEMARENNEEDAKKDYIKRQKANQDEKNAAMEKAAFQYNGKKELPDNIFHGHKELTTKIRLWHQQGEKCLYTGKNIPISDLIHNQYKYEIDHILPLSLSFDDSLSNKVLVLATANQEKGQRTPFQALDSMDDAWSYREFKSYVKDSKLLSNKKKDYLLTEEDISKIEVKQKFIERNLVDTRYSSRVVLNALQDFYKSHQLDTTISVVRGQFTSQLRRKWGIEKSRETYHHHAVDALIIAASSQLRLWKKHSNPLIAYKEGQFVDSETGEIVSLSDEEYKELVFKAPYDHFVDTLRSKKFEDSILFSYQVDSKYNRKISDATIYATRKAKLDKEKKEYTYTLGKIKDIYALGTKTPSKTGFYKFLDLYKTDKSQFLMYQKDRKTWDEVIEKIIEQYRPFKEYDKNGKEVDFNPFEKYRIGNGPIRKYSKKGNGPEIKSLKYYDILLGKHKNITPDGSRNTVALLSLNPWRTDVYYNSETKKYEFLGLKYADLCFEEGGAYGISEVKYKKIREKEGIGKNSEFKFTLYKNDLILIKDTETNCQQFFRFWSRTGKDNPKSFEKHKIELKPYEKAKFEKGEELKVLGKVPPSSNQFQKNMQIENLSIYKVKTDILGNKHFIKKEGDEPKLKFKK

SEQ ID NO: 59 - protein, 984 aa, Campylobacter jejuni
MARILAFDIGISSIGWAFSENDELKDCGVRIFTKAENPKTGESLALPRRLARSARKRLARRKARLNHLKHLIANEFKLNYEDYQSFDESLAKAYKGSLISPYELRFRALNELLSKQDFARVILHIAKRRGYDDIKNNGDEEKSEILKAIKQNEEKLVNYQSVGEYLYKEYFQKFKENSKEFINVRNKKESYERCITQSFLKDELKLIFQKQREFGFSFSKKFEEEVLSVAFYKRALKDFSHLVGNCSFFTDEKRAPKNSPLAFMFVALTRIINILNNLKNTEGILYTKDDLNALLNEVLKNGTLTYKQTKKLLGLSDDYEFKGEKGTYFIEFKKYKEFIKALGEHNLSQDDLNEIAKDITLIKDEIKLKKALAKYDLNQNQIDSLSKLEFKDHLNISFKALKLITPLMLEGKKYDEACNELNLKVAINEDKKDFLPAFNETYYKDEVTNPVVLRAIKEYRKILNALLKKYGKVHKINIELAREVGKNHSQRAKIEKEQNENYKAKKDAEIECEKLGLKINSKNILKLRLFKEQKEFCAYSGEKIKLSDLQDEKMLEIDHIYPYSRSFDDSYMNKVLVFTKQNQEKLNKTPFEAFGNDSTKWQKIEVLAKNLPEKKQKRILDKNYKDKEQKDFKDRNLNDTRYIARLVLNYTKDYLDFLPLSDDENTKLNDTQKGSKVHVEAKSGMLTSALRHTWGFSAKDRNNHLHHAIDAAIIAYANNSIVKAFSDFKKEQESNSVELYAKKISELDYKNKRKFFEPFSGFRQKVLDKIDEIFVSKPERKKPSGALHEETFRKEEEFYQSYGGKEGVLKALELGKIRKVNGKIVKNGDMFRVDIFKHKKTNKFYAVPIYTMDFALKVLPNKAVARSKKGEIKDWILMDENYEFCFSLYKDSLILIQTKDMQEPELVYFNAFTSSTVSLIVSKHDNKFETLSKNQKILFKNANEKEVIAKSIGIQNLKVFEKYIVSALGEVTKAEFRQREDFKK

SEQ ID NO: 60 - protein, 1079 aa, Dinoroseobacter shibae
MRLGLDIGTSSIGWWLYETDGAGSDARITGVVDGGVRIFSDGRDPKSGASLAVDRRAARAMRRRRDRYLRRRATLMKVLAETGLMPADPAEAKALEALDPFALRAAGLDEPLPLPHLGRALFHLNQRRGFKSNRKTDRGDNESGKIKDATARLDMEMMANGARTYGEFLHKRRQKATDPRHVPSVRTRLSIANRGGPDGKEEAGYDFYPDRRHLEEEFHKLWAAQGAHHPELTETLRDLLFEKIFFQRPLKEPEVGLCLFSGHHGVPPKDPRLPKAHPLTQRRVLYETVNQLRVTADGREARPLTREERDQVIHALDNKKPTKSLSSMVLKLPALAKVLKLRDGERFTLETGVRDAIACDPLRASPAHPDRFGPRWSILDADAQWEVISRIRRVQSDAEHAALVDWLTEAHGLDRAHAEATAHAPLPDGYGRLGLTATTRILYQLTADVVTYADAVKACGWHHSDGRTGECFDRLPYYGEVLERHVIPGSYHPDDDDITRFGRITNPTVHIGLNQLRRLVNRIIETHGKPHQIVVELARDLKKSEEQKRADIKRIRDTTEAAKKRSEKLEELEIEDNGRNRMLLRLWEDLNPDDAMRRFCPYTGTRISAAMIFDGSCDVDHILPYSRTLDDSFPNRTLCLREANRQKRNQTPWQAWGDTPHWHAIAANLKNLPENKRWRFAPDAMTRFEGENGFLDRALKDTQYLARISRSYLDTLFTKGGHVWVVPGRFTEMLRRHWGLNSLLSDAGRGAVKAKNRTDHRHHAIDAAVIAATDPGLLNRISRAAGQGEAAGQSAELIARDTPPPWEGFRDDLRVRLDRIIVSHRADHGRIDHAARKQGRDSTAGQLHQETAYSIVDDIHVASRTDLLSLKPAQLLDEPGRSGQVRDPQLRKALRVATGGKTGKDFENALRYFASKPGPYQAIRRVRIIKPLQAQARVPVPAQDPIKAYQGGSNHLFEIWRLPDGEIEAQVITSFEAHTLEGEKRPHPAAKRLLRVHKGDMVALERDGRRVVGHVQKMDIANGLFIVPHNEANADTRNNDKSDPFKWIQIGARPAIASGIRRVSVDEIGRLRDGGTRPI

SEQ ID NO: 61 - protein, 1096 aa, Eubacterium dolichum
MMEVFMGRLVLGLDIGITSVGFGIIDLDESEIVDYGVRLFKEGTAAENETRRTKRGGRRLKRRRVTRREDMLHLLKQAGIISTSFHPLNNPYDVRVKGLNERLNGEELATALLHLCKHRGSSVETIEDDEAKAKEAGETKKVLSMNDQLLKSGKYVCEIQKERLRTNGHIRGHENNFKTRAYVDEAFQILSHQDLSNELKSAIITIISRKRMYYDGPGGPLSPTPYGRYTYFGQKEPIDLIEKMRGKCSLFPNEPRAPKLAYSAELFNLLNDLNNLSIEGEKLTSEQKAMILKIVHEKGKITPKQLAKEVGVSLEQIRGFRIDTKGSPLLSELTGYKMIREVLEKSNDEHLEDHVFYDEIAEILTKTKDIEGRKKQISELSSDLNEESVHQLAGLTKFTAYHSLSFKALRLINEEMLKTELNQMQSITLFGLKQNNELSVKGMKNIQADDTAILSPVAKRAQRETFKVVNRLREIYGEFDSIVVEMAREKNSEEQRKAIRERQKFFEMRNKQVADIIGDDRKINAKLREKLVLYQEQDGKTAYSLEPIDLKLLIDDPNAYEVDHIIPISISLDDSITNKVLVTHRENQEKGNLTPISAFVKGRFTKGSLAQYKAYCLKLKEKNIKTNKGYRKKVEQYLLNENDIYKYDIQKEFINRNLVDTSYASRVVLNTLTTYFKQNEIPTKVFTVKGSLTNAFRRKINLKKDRDEDYGHHAIDALIIASMPKMRLLSTIFSRYKIEDIYDESTGEVFSSGDDSMYYDDRYFAFIASLKAIKVRKFSHKIDTKPNRSVADETIYSTRVIDGKEKVVKKYKDIYDPKFTALAEDILNNAYQEKYLMALHDPQTFDQIVKVVNYYFEEMSKSEKYFTKDKKGRIKISGMNPLSLYRDEHGMLKKYSKKGDGPAITQMKYFDGVLGNHIDISAHYQVRDKKVVLQQISPYRTDFYYSKENGYKFVTIRYKDVRWSEKKKKYVIDQQDYAMKKAEKKIDDTYEFQFSMHRDELIGITKAEGEALIYPDETWHNFNFFFHAGETPEILKFTATNNDKSNKIEVKPIHCYCKMRLMPTISKKIVRIDKYATDVVGNLYKVKKNTLKFEFD

SEQ ID NO: 62 - protein, 1082 aa, Neisseria meningitidis
MAAFKPNPINYILGLDIGIASVGWAMVEIDEDENPICLIDLGVRVFERAEVPKTGDSLAMARRLARSVRRLTRRRAHRLLRARRLLKREGVLQAADFDENGLIKSLPNTPWQLRAAALDRKLTPLEWSAVLLHLIKHRGYLSQRKNEGETADKELGALLKGVADNAHALQTGDFRTPAELALNKFEKESGHIRNQRGDYSHTFSRKDLQAELNLLFEKQKEFGNPHISDGLKEGIETLLMTQRPALSGDAVQKMLGHCTFEPAEPKAAKNTYTAERFIWLTKLNNLRILEQGSERPLTDTERTTLIDEPYRKSKLTYAQARKLLELDNTAFFKGLRYGKDNAEASTLMEMKAYHAISRALEKEGLKDKKSPLNLSPELQDEIGTAFSLFKTDEDITGRLKDRVQPEILEALLKHISFDKFVQISLKALRRIVPLMEQGKRYDEACAEIYGDHYGKKNTEEKIDLPPIPADEIRNPVVLRALSQARKVINGVVRRYGSPARIHIETAREVGKSFKDRKEIEKRQEENRKDREKAATKFREYFPNFVGEPKSKDILKLRLYEQQHGKCLYSGKEINLGRLNEKGYVEIDHALPFSRTWDDSFNNKVLVLGSENQNKGNQTPYEYFNGKDNSREWQEFKARVETSRFPRSKKQRILLQKFDEEGFKERNLNDTRYVNRFLCQFVADHMLLTGKGKRRVFASNGQITNLLRGFWGLRKVRAENDRHHALDAVVVACSTVAMQQKITRFVRYKEMNAFDGKTIDKETGEVLHQKTHFPQPWEFFAQEVMIRVFGKPDGKPEFEEADTPEKLRTLLAEKLSSRPEAVHEYVTPLFVSRAPNRKMSGQGHMETVKSAKRLDEGVSVLRVPLTQLKLKDLEKMVNREREPKLYEALKARLEAHKDDPAKAFAEPFYKYDKAGNRTQQVKAVRVEQVQKTGVWVRNHNGIADNATMVRVDVFEKGDKYYLVPIYSWQVAKGILPDRAVVQGKDEEDWQLIDDSFNFKFSLHPNDLVEVITKKARMFGYFASCHRGTGNINIRIHDLDHKIGKNGILEGIGVKTALSFQKYQIDELGKEIRPCRLKKRPPVR

SEQ ID NO: 63 - protein, 1050 aa, Gluconacetobacter diazotrophicus
MGENMIDESLTFGIDLGIGSCGWAVLRRPSAFGRKGVIEGMGSWCFDVPETSKERTPTNQIRRSNRLLRRVIRRRRNRMAAIRRLLHAAGLLPSTDSDALKRPGHDPWELRARGLDKPLKPVEFAVVLGHIAKRRGFKSAAKRKATNISSDDKKMLTALEATRERLGRYRTVGEMFARDPDFASRRRNREGKYDRTTARDDLEHEVHALFAAQRRLGQGFASPELEEAFTASAFHQRPMQDSERLVGFCPFERTEKRAAKLTPSFERFRLLARLLNLRITTPDGERPLTVDEIALVTRDLGKTAKLSIKRVRTLIGLEDNQRFTTIRPEDEDRDIVARTGGAMTGTATLRKALGEALWTDMQERPEQLDAIVQVLSFFEANETITEKLREIGLTLAVLDVLLTALDAGVFAKFKGAAHISTKAARNLLPHLEQGRRYDEACTMAGYDHAASRLSHHGQIVAKTQFNALVTEIGESIANPIARKALIEGLKQIWAMRNHWGLPGSIHVELARDVGNSIEKRREIEKHIEKNTALRARERREVHDLLDLEDVNGDTLLRYRLWKEQGGKCLYTGKAIHIRQIAATDNSVQVDHILPWSRFGDDSFNNKTLCLASANQQKKRSTPYEWLSGQTGDAWNAFVQRIETNKELRGFKKRNYLLKNAKEAEEKFRSRNLNDTRYAARLFAEAVKLLYAFGERQEKGGNRRVFTRPGALTAALRQAWGVESLKKQDGKRINDDRHHALDALTVAAVDEAEIQRLTKSFHEWEQQGLGRPLRRVEPPWESFRADVEATYPEVFVARPERRRARGEGHAATIRQVKERECTPIVFERKAVSSLKEADLERIKDGERNEAIVEAIRSWIATGRPADAPPRSPRGDIITKIRLATTIKAAVPVRGGTAGRGEMVRADVFSKPNRRGKDEWYLVPVYPHQIMNRKAWPKPPMRSIVANKDEDEWTEVGPEHQFRFSLYPRSNIEIIRPSGEVIEGYFVGLHRNTGALTISAHNDPKSIHSGIGTKTLLAISKYQVDRFGRKSPVRKEVRTWHGEACISPTPPG

SEQ ID NO: 64 - protein, 1391 aa, Kordia algicida
MKKILGLDLGTNSIGWALVNEAEHEHEQSSIVKLGVRVNPLSVDEKTNFEKGRPLSINADRTSKRSARRNLQRFKLRRKNLINLLLKHHIISNETILTEVGKNTTHQTLKLRSKATQEKISLEEFARILLSINKKRGYKSSRKEKNEDEGFTIDGMAIAKELYDNQLTPGQYVYNILQDGKNYIPDFYRSDLQAEFDDVWQFQKKFYSSILTDEFYLKLKGQGKENTRKLFLAIHQVYTAENKGKRDAVKLQYYKWRSEAVKKQLSIEEVAYVLVEINNNINKSSGYLGAISDRSKALYFNNETVGEYLYGQLVKNRHNSLRNQVFYRQDYLDEFEKIWETQAKFYDELTNELKQEIRDVVIFYQRKLKSQKHLISDCLFEKHHKAIPKSSPLFQEFKIWQNLNYLEFVHTQSKEKIFFSELDDETRQFVFAELNIRGTLKIKEIKKLIGLETPVYWKSNFDEIEGNRTNQVLYNVYQNIADDLGYGFDWSKKHAFEINAELQAIFKDVGIDTAILNFDASIEENDFDKQKSYQLWHLLYSAEDTDKATEEDKLIYGNINTKLKKQLHQKYGFEAKYGNLLANISLQQDYGNLSAKAIKKILPYLESGNSFYEACTIVGYNPSNSLTKEQQQNRKLKDKLELLPKNSLRNPVVEKILNQKVNLINQLIDEYGKPDEVRIELARELKKSAKQRADLSKHINDATLKNQNIRKTLQKDFGIQNPSKNDVIRYKLYDELKDNGYKTLFTNKYIPKEQLFSKDVDIEHIIPKAILFDDSFSNKTLAYRNVNLAKADATAFDFISSKHLDDLDNYKARVETLFQSKRISKGKYKKLLMTRQNLPEDFIERDLRNSQYIAKKATAMLKEVFRSVVPTSGRITDKLREDWDLVNVMKELNLPKYRTLGLTEFIERKNGNKIEQIIDWTKRNDHRHHAMDALTVAFTTHNHIQYLNNLNVTHGLNGVDTDHEKSRLYAIKQAITKVYIVGKTKKRKFIPPMENFRSHAKNHLEGILISFKNKNKVVTKNKNRTKTKTKGVFNEKIQLTPRGQLHKETIYGHAKKVIVTKEKVSSKFTHEKILQVTKPAYREALLKRLASFKNDPKKAFSGKNALSKNPLYFDITSGKKVPDTVKLSYFENSYVIRKEVNSDNFKNEKSLQKVLDVGIRRILEKRLADYNGNAKEAFSNLEKNPIWKDKEKGVCIKKVRIEALKNAEPLHVKKDHLGKIILDDENKSTPVDFISTGNNHHVAIYEDKDGKLHDKVVSFYEVVSRVNLGLPIIDKSFNSHLDWKFLFSMKQNEMFVFPSEDFNPKEIDIGNPKNNELISKYLFRVQKFSKVTYGNSAVRDYVFRHHLETELIDKKELKGITYYQLKSIGMLEKLVKVRINHIGKIVHIGEY

SEQ ID NO: 65 - protein, 1116 aa, Clostridium spiroforme
MVEFLLKEMKIMGRLVLGLDIGITSVGYGVIDIDKNEFVDYGVRLFKEGTAINNEERRSKRGARRLKRRKTNRIADMKKLLERNGLIDEQYTALNNPYEIRKKGLKNKLSNYELATAILHITKNRGTCLESNADETQDEESTKNILSKNALELKDKYICEIQLARLEESGKIRGINNNFKTEDYLKELSKILENQDLEKETIDKIKEIVARRRRYDQGPGSEKSPTPYGSYRMENGELVHVNLIDMMRGKCSVFPDQLRAPQQSYSAELFNLLNDLNNLKINGEKLSSTEKQKIIDFVNEKGGITVKQLLKLIDVGITEISGFRIDKNEKPLITEFKGYKKVLKVFKNYNQESLLNDKSIVDTIMDINTKIKSIDERSDQLKQVLPSLDTSIINDLASIKGVSGYHSLSLKALNLINNEMLKTEMNQMQVLHQLDIFDKNRVSLKGQRQIYADDNAILSPVAKRAHRETFKVINKLRSIYGEFDSIVIETTRDKNTQDQKKRIKNNQKNYEERNTEVNNFLKEAGYNPENINAKTKMKIRLYIEQDAKSAYTLQDINLKELIEDEKAYEIDHIIPISISLDDSFNNKVLTTHDENQEKGNLTPISAFLKGKFHNGNLNTYKVFIQNNKNLNRKKKEYLLCEDDITRYEVVQNFINRNLVDTSYACRTVMNTLVHYFKDNEINTKVHTIKGQATSTFRKRIGLIKDREEDYFHHAIDALIVASLKKMNLINSYLMKVDFNEMYDEETGEIFNVLPDNSYLDEKYISFVSNLKNIYEESNKYIRGVMIKEKMTYPLIKVSHKIDTKPNRKISDDTIYSTRNVDNQDMLVERIKNIYDPKENAANTLINDIINDNTDKYIMYHKDPQTFDKIKAIVLNHFNEFKTDKNCYIVTKEGLYKLKGTSPLALYYEEFGPITKYAKKNNGPTIHSMKFYSEKLGNHLSITHKYSTVNKKVITKQISPYRTDFYQSPEGKYKFVTVRYKDVAYNAKKDKYIIDHSWYREQKKLKKIADEWIFVCSVHRDELIGIMKADGQKRIFDSSTESDGETLYHDAKTYEILKFTATNNDITGRFEVKPIYCYCKKQLMVSIGTCRKIQKFATDVLGNLYIVKDNVLKLEFK

SEQ ID NO: 66 - protein, 1348 aa, Finegoldia magna
MKSEKKYYIGLDVGTNSVGWAVTDEFYNILRAKGKDLWGVRLFEKADTAANTRIFRSGRRRNDRKGMRLQILREIFEDEIKKVDKDFYDRLDESKFWAEDKKVSGKYSLFNDKNFSDKQYFEKFPTIFHLRKYLMEEHGKVDIRYYFLAINQMMKRRGHFLIDGQISHVTDDKPLKEQLILLINDLLKIELEEELMDSIFEILADVNEKRTDKKNNLKELIKGQDFNKQEGNILNSIFESIVTGKAKIKNIISDEDILEKIKEDNKEDFVLTGDSYEENLQYFEEVLQENITLFNTLKSTYDFLILQSILKGKSTLSDAQVERYDEHKKDLEILKKVIKKYDEDGKLFKQVFKEDNGNGYVSYIGYYLNKNKKITAKKKISNIEFTKYVKGILEKQCDCEDEDVKYLLGKIEQENFLLKQISSINSVIPHQIHLFELDKILENLAKNYPSFNNKKEEFTKIEKIRKTFTFRIPYYVGPLNDYHKNNGGNAWIFRNKGEKIRPWNFEKIVDLHKSEEEFIKRMLNQCTYLPEETVLPKSSILYSEYMVLNELNNLRINGKPLDTDVKLKLIEELFKKKTKVTLKSIRDYMVRNNFADKEDFDNSEKNLEIASNMKSYIDFNNILEDKFDVEMVEDLIEKITIHTGNKKLLKKYIEETYPDLSSSQIQKIINLKYKDWGRLSRKLLDGIKGTKKETEKTDTVINFLRNSSDNLMQIIGSQNYSFNEYIDKLRKKYIPQEISYEVVENLYVSPSVKKMIWQVIRVTEEITKVMGYDPDKIFIEMAKSEEEKKTTISRKNKLLDLYKAIKKDERDSQYEKLLTGLNKLDDSDLRSRKLYLYYTQMGRDMYTGEKIDLDKLFDSTHYDKDHIIPQSMKKDDSIINNLVLVNKNANQTTKGNIYPVPSSIRNNPKIYNYWKYLMEKEFISKEKYNRLIRNTPLTNEELGGFINRQLVETRQSTKAIKELFEKFYQKSKIIPVKASLASDLRKDMNTLKSREVNDLHHAHDAFLNIVAGDVWNREFTSNPINYVKENREGDKVKYSLSKDFTRPRKSKGKVIWTPEKGRKLIVDTLNKPSVLISNESHVKKGELFNATIAGKKDYKKGKIYLPLKKDDRLQDVSKYGGYKAINGAFFFLVEHTKSKKRIRSIELFPLHLLSKFYEDKNTVLDYAINVLQLQDPKIIIDKINYRTEIIIDNFSYLISTKSNDGSITVKPNEQMYWRVDEISNLKKIENKYKKDAILTEEDRKIMESYIDKIYQQFKAGKYKNRRTTDTIIEKYEIIDLDTLDNKQLYQLLVAFISLSYKTSNNAVDFTVIGLGTECGKPRITNLPDNTYLVYKSITGIYEKRIRIK

SEQ ID NO: 67 - protein, 1129 aa, Streptococcus infantarius
MSNGKILGLDIGVASVGVGIIDSKTGNVIHANSRLFSAANAENNAERRGFRGARRLTRRKKHRVKRVRDLFEKYDISTDFRNLNLNPYELRVKGLTEQLTNEELFAALRTIAKRRGISYLDDAEDDSTGSSDYAKSIDENRRLLKTKTPGQIQLERLEKYGQLRGNFTVYDENGEAHRLINVFSTSDYKNEARKILETQSNYNKQITDEFIEDYIEILTQKRKYYHGPGNEKSRTDYGRFRTDGTTLENIFGILIGKCSFYPEEYRASKASYTAQEFNFLNDLNNLKVPTETGKLSTEQKEYLVDFAKKSKALGASKLLKEIAKIVDCSVDDIKGYRVDNKDKPDLHTFEPYRKLKFNLSSIDIDELSRETLDKLADILTLNTEREGIEDAIKRNLPSQFTEEQISEIVQIRKNQSSAFNKGWHSFSAKLMNELIPELYVTSEEQMTILTRLEKFKVNKKSSKNTKTIDEKEITDEIYNPVVAKSVRQTIKIINAAVKKYGDFDKIVIEMPRDKNAEDEKKFIDKKQKENKKEKDDSLKRAAFLYNGTDNLPDGVFHGNKELKTKIRLWYQQGERCLYSGKLISIHDLVHNSNKFEIDHILPLSLSFDDSLANKVLVYAWTNQEKGQKTPYQVIDSMDTAWSFREMKDYVLKQKGLGKKKCEYLLTTENIDKIEVKKKFIERNLVDTRYASRVVLNSLQTALKELGKDTKVSVVRGQFTSQLRRKWNIDKSRETYHHHAVDALIIAASSQLKLWQKQENPMFESYGENQVVNKETGEILSISDDKYKELVFQPPYQGFVNTISSKGFEDEILFSYQVDSKFNRKVSDATIYSTRKAKLGKDKKDETYVLGKIKDIYSQDGFDTFIKRYKKDKTQFLMYQKDPLTWENVIEVILRDYPSEKLSEDGKKTVKCNPFEEYRRENGLICKYSKKGNGTPIKSLKYYDKKLGNCIDITPEKSKNRVVLRQISPWRADIYFNLETLKYELMGLKYSDLSFEKGTGKYHISQEKYDAIREKEGIGKKSEFKFTLYRNDLILIKDTLNNCERMLRFGSKNDTSKHYVELKPLEKGTFDSEEEILPVLGKVAKSGQFIKGLNKPNISIYKVRTDVLGNKFFIKKEGDKPKLDFKNNNK

SEQ ID NO: 68 - protein, 1065 aa, Clostridium perfringens
MNKDINYALGLDIGITSVGWAVINLDLNRIEDLGVRIFNAAENLKDGSSLALPRRLARGRRRLLRRKAYRVERVRKLILKNNILTKEELEGLFKNKEVIDVWEARVKGLDYKLSREEWAKILINFCKRRGFKSNRKNEAKDKEAGQILSSISYNIEKMKETNSRTIGEYIYNEVKNSEDSYAPLRNKFGEYKMCVSRDVIREEIHTLFEKQRELGNNFASDEIEDKYFEIFNSQRPFSNFEDLEKLVGFCTFERKKHKRAPKHCISSEEFTLYEGINKLSIIKDGEKRKLSEEERTLVVNEAFNKKEIKYTTLRKLLGLSEEELFSTLTYSIDKDISKTENTKFVSLKGYHEIKRAIEKGVSKKAWQDIENNRNLLNDIAYVLTLGKTDDEIEKQLRLRNVPEELFESLLDMSFNKFNNLSIYALEKILPFMKEGYQYNEACEKAGYNFKAIYEGVRTKKLPVIEIDEIVNPVVNRALAQTRKVINSVIDKYGSPVRINIELARDLAKNFKDRKLIEKEQKENRANLDKIRENLRELMDKEPTVVEVLKYRLWEQQRGECAYTQSQIPLERLFSPGYCEIDHIIPFSRSFDDSLSNKILVLGSENQRKGNRTPYEYFGEDSERWNSFEIWVKGSYLNYKKKANLLKKKFSEEEQRDWKARNLQDTKYICRYISNFVNNRLEFKESENKQKVITVNGRATAYLRSRWGLNKVREDGDKHHALDAAVVGVTTQGMVQKISKYSKAHELYTVRKNDEFVDVETGECVDVDEYKEIRKDILPRPWRGFSEELKLRLSDNPLEELKKSPIETYNEEFIKENVKPIFVSRVPFRKISGKLFKETIYSERAFKDGYFVSKKSLVDLKRGDLDNFYNYECDKKLYDAISERMKEFNYNGKKAFESPFRKPTKSGKEGPVVRSVKIKSAVPFKDGIPMNEGLVAKEGMVRIDIYEKEGKYFVVPVYRYQLAKGIVPKRAAIAKKDELKWPIMDQTYNFKFSIYKNDLIEVKYDKKGVYFGYYDGFDRNSASLTIEKHDNSERYRSIGLKVGVLEINKYEVDVLGNYHKVKLGGN

SEQ ID NO: 69 - protein, 1195 aa, Elusimicrobium minutum
MQKNINTKQNHIYIKQAQKIKEKLGDKPYRIGLDLGVGSIGFAIVSMEENDGNVLLPKEIIMVGSRIFKASAGAADRKLSRGQRNNHRHTRERMRYLWKVLAEQKLALPVPADLDRKENSSEGETSAKRFLGDVLQKDIYELRVKSLDERLSLQELGYVLYHIAGHRGSSAIRTFENDSEEAQKENTENKKIAGNIKRLMAKKNYRTYGEYLYKEFFENKEKHKREKISNAANNHKFSPTRDLVIKEAEAILKKQAGKDGFHKELTEEYIEKLTKAIGYESEKLIPESGFCPYLKDEKRLPASHKLNEERRLWETLNNARYSDPIVDIVTGEITGYYEKQFTKEQKQKLFDYLLTGSELTPAQTKKLLGLKNTNFEDIILQGRDKKAQKIKGYKLIKLESMPFWARLSEAQQDSFLYDWNSCPDEKLLTEKLSNEYHLTEEEIDNAFNEIVLSSSYAPLGKSAMLIILEKIKNDLSYTEAVEEALKEGKLTKEKQAIKDRLPYYGAVLQESTQKIIAKGFSPQFKDKGYKTPHTNKYELEYGRIANPVVHQTLNELRKLVNEIIDILGKKPCEIGLETARELKKSAEDRSKLSREQNDNESNRNRIYEIYIRPQQQVIITRRENPRNYILKFELLEEQKSQCPFCGGQISPNDIINNQADIEHLFPIAESEDNGRNNLVISHSACNADKAKRSPWAAFASAAKDSKYDYNRILSNVKENIPHKAWRFNQGAFEKFIENKPMAARFKTDNSYISKVAHKYLACLFEKPNIICVKGSLTAQLRMAWGLQGLMIPFAKQLITEKESESFNKDVNSNKKIRLDNRHHALDAIVIAYASRGYGNLLNKMAGKDYKINYSERNWLSKILLPPNNIVWENIDADLESFESSVKTALKNAFISVKHDHSDNGELVKGTMYKIFYSERGYTLTTYKKLSALKLTDPQKKKTPKDFLETALLKFKGRESEMKNEKIKSAIENNKRLFDVIQDNLEKAKKLLEEENEKSKAEGKKEKNINDASIYQKAISLSGDKYVQLSKKEPGKFFAISKPTPTTTGYGYDTGDSLCVDLYYDNKGKLCGEIIRKIDAQQKNPLKYKEQGFTLFERIYGGDILEVDFDIHSDKNSFRNNTGSAPENRVFIKVGTFTEITNNNIQIWFGNIIKSTGGQDDSFTINSMQQYNPRKLILSSCGFIKYRSPILKNKEG

SEQ ID NO: 70 - protein, 1101 aa, Akkermansia muciniphila
MSRSLTFSFDIGYASIGWAVIASASHDDADPSVCGCGTVLFPKDDCQAFKRREYRRLRRNIRSRRVRIERIGRLLVQAQIITPEMKETSGHPAPFYLASEALKGHRTLAPIELWHVLRWYAHNRGYDNNASWSNSLSEDGGNGEDTERVKHAQDLMDKHGTATMAETICRELKLEEGKADAPMEVSTPAYKNLNTAFPRLIVEKEVRRILELSAPLIPGLTAEIIELIAQHHPLTTEQRGVLLQHGIKLARRYRGSLLFGQLIPRFDNRIISRCPVTWAQVYEAELKKGNSEQSARERAEKLSKVPTANCPEFYEYRMARILCNIRADGEPLSAEIRRELMNQARQEGKLTKASLEKAISSRLGKETETNVSNYFTLHPDSEEALYLNPAVEVLQRSGIGQILSPSVYRIAANRLRRGKSVTPNYLLNLLKSRGESGEALEKKIEKESKKKEADYADTPLKPKYATGRAPYARTVLKKVVEEILDGEDPTRPARGEAHPDGELKAHDGCLYCLLDTDSSVNQHQKERRLDTMTNNHLVRHRMLILDRLLKDLIQDFADGQKDRISRVCVEVGKELTTFSAMDSKKIQRELTLRQKSHTDAVNRLKRKLPGKALSANLIRKCRIAMDMNWTCPFTGATYGDHELENLELEHIVPHSFRQSNALSSLVLTWPGVNRMKGQRTGYDFVEQEQENPVPDKPNLHICSLNNYRELVEKLDDKKGHEDDRRRKKKRKALLMVRGLSHKHQSQNHEAMKEIGMTEGMMTQSSHLMKLACKSIKTSLPDAHIDMIPGAVTAEVRKAWDVFGVFKELCPEAADPDSGKILKENLRSLTHLHHALDACVLGLIPYIIPAHHNGLLRRVLAMRRIPEKLIPQVRPVANQRHYVLNDDGRMMLRDLSASLKENIREQLMEQRVIQHVPADMGGALLKETMQRVLSVDGSGEDAMVSLSKKKDGKKEKNQVKASKLVGVFPEGPSKLKALKAAIEIDGNYGVALDPKPVVIRHIKVFKRIMALKEQNGGKPVRILKKGMLIHLTSSKDPKHAGVWRIESIQDSKGGVKLDLQRAHCAVPKNKTHECNWREVDLISLLKKYQMKRYPTSYTGTPR

SEQ ID NO: 71 - protein, 1187 aa, Bifidobacterium longum
MLSRQLLGASHLARPVSYSYNVQDNDVHCSYGERCFMRGKRYRIGIDVGLNSVGLAAVEVSDENSPVRLLNAQSVIHDGGVDPQKNKEAITRKNMSGVARRTRRMRRRKRERLHKLDMLLGKFGYPVIEPESLDKPFEEWHVRAELATRYIEDDELRRESISIALRHMARHRGWRNPYRQVDSLISDNPYSKQYGELKEKAKAYNDDATAAEEESTPAQLVVAMLDAGYAEAPRLRWRTGSKKPDAEGYLPVRLMQEDNANELKQIFRVQRVPADEWKPLFRSVFYAVSPKGSAEQRVGQDPLAPEQARALKASLAFQEYRIANVITNLRIKDASAELRKLTVDEKQSIYDQLVSPSSEDITWSDLCDFLGFKRSQLKGVGSLTEDGEERISSRPPRLTSVQRIYESDNKIRKPLVAWWKSASDNEHEAMIRLLSNTVDIDKVREDVAYASAIEFIDGLDDDALTKLDSVDLPSGRAAYSVETLQKLTRQMLTTDDDLHEARKTLFNVTDSWRPPADPIGEPLGNPSVDRVLKNVNRYLMNCQQRWGNPVSVNIEHVRSSFSSVAFARKDKREYEKNNEKRSIFRSSLSEQLRADEQMEKVRESDLRRLEAIQRQNGQCLYCGRTITFRTCEMDHIVPRKGVGSTNTRTNFAAVCAECNRMKSNTPFAIWARSEDAQTRGVSLAEAKKRVTMFTFNPKSYAPREVKAFKQAVIARLQQTEDDAAIDNRSIESVAWMADELHRRIDWYFNAKQYVNSASIDDAEAETMKTTVSVFQGRVTASARRAAGIEGKIHFIGQQSKTRLDRRHHAVDASVIAMMNTAAAQTLMERESLRESQRLIGLMPGERSWKEYPYEGTSRYESFHLWLDNMDVLLELLNDALDNDRIAVMQSQRYVLGNSIAHDATIHPLEKVPLGSAMSADLIRRASTPALWCALTRLPDYDEKEGLPEDSHREIRVHDTRYSADDEMGFFASQAAQIAVQEGSADIGSAIHHARVYRCWKTNAKGVRKYFYGMIRVFQTDLLRACHDDLFTVPLPPQSISMRYGEPRVVQALQSGNAQYLGSLVVGDEIEMDFSSLDVDGQIGEYLQFFSQFSGGNLAWKHWVVDGFFNQTQLRIRPRYLAAEGLAKAFSDDVVPDGVQKIVTKQGWLPPVNTASKTAVRIVRRNAFGEPRLSSAHHMPCSWQWRHE

SEQ ID NO: 72 - protein, 166 aa, uncultured Termite
MNKVQEIEYKKIREKLADREYRIGLDLGVGSIGYVVVSLKECNDLSYLPEDIILSGSRIFKSSIGAVERREFRLQRNSHRHHRERMRFLWQLLAEKQLALQSSKDLEKKENSADCETSQKRFPINILKEDPYILRYKALEEKLSLFQLGYVLYHIANHSNTAYENT

SEQ ID NO: 73 - protein, 1032 aa, uncultured Termite
MLYHIANHRGTDSVRSFLEYDDDKIKENTLTAKIAKETKKVIDAKKYRTFGEYLYKGKIEKFQQNIRKKVSNRKTPANKNKEFAVTRDVIIKETEKILASQKQYYTYILTDEYIKKIKDAISYQTEKLIPESGYCPYFKDEKRLPRSHKLNEYRRMYEALNNAKYFDPVLDENTGEILSYQEKEFSREEKKILFDEVLLKGMELTESGAKKLLYHLPDGCEVQLQGRDKTTQKIKGYALVDLEASPFWLRLSQQQQDEFLYDWNSLPLEKLKPKLTNYYSLTESEVDETFQEIKLPSNYASVGKKAMEILLTYIKDGCSYTEALEKAVSEGKLKVDKQTMIYDSLPYYGKILKESTQKLIGKAFSKQFADRNYKEPDTNKNEREFGKIANPVVHQTLNELRKLINEIITVFGKKPLEIGLETTRELKKSKKNREYLSKQQNKNEYARNRIYKEYIEPHLSQIKSRQENPSKYISKFELLEEQNFICPFCSEKITPDDIINSKVDVEHIFPIEESEDITKNNLVIAHNECNADKGKKSPFDAFGDKTSGKYRWNCILHNAQKNLPHKVWRFYQGSLEKFLENKPMSRRFGTDNSYISKIAARYLACLFNDPYHSEIFCIKSSLIAQLRIAWDLNSIMVPLVKNILSEKELEEFKISKNKKIRIDNRHHALDAIVIAYANRGYHNFLNRIHAKEYKINYREKSWLSKILLPPLNRDLEDFKISVKDSIEKANVSIKHDHNTNGSLVKATAYKVYYSGAGEYIITTSKNVEEISFKEKEDPKDTLYRALCKFECRDIDIKDEKLIKKLKYNSTLYKKVQNNLSKAKQELEQDNKKTEEEGKKSQKITEVRIYKKACSLVKGQYIQCGSRLKDKFFAVKEPTEIKTGLGYDTGDNLFLDLYYDKTGKLCGEIIRKVNFNRNKPNYQKEGYTLFERIYQSDILEVDTSEDRISLKNKTGSAPSDRTFIKVNTFTEVNAYFDGKRDKIQIFFGNLLKSSFKNDSFFISSMQKYNVRKVILTSLGIIKYRSQILKNKEV

SEQ ID NO: 74 - protein, 1032 aa, uncultured Termite
MKKRILGLDIGIASVGWALVEFDDEFQDNKKKGTIIKSGVRIFTRAETPKERESLAKPRREARSQRRRIRRRVERLNSIRELFVKNGVVEEWSVSKKNPNNIYITLNQIKTPWQLRMESLDRKLTNEQFAVVLTHLAKHRGYKSLRKDDKAGKVLEAISQNKKRLNDSDYRTLGEMFCKNESYKEHKRNKGGEYINSVARELIEEEVEKIFVKQREKGNNFADVNTEREYLKIAFSQKPAGSISKMVGFCTFENGEKRAPRDSYSAELFKVLCTINNTTFTDMKTGEIRSFSKEEIGKTLETVKNVKDVKYAKIRKDLGLEDSVKFSGVDYRENAKSKGEGEIFVSMKTYHEIKSKIEKLSKEKWDNLKGNTELLDSIVNIIANLKDDESIKKEFQKLKIDEDIIDVLLNFEFKKFINLSFKALRKIIPFQFQGQKYITASTSAGYSLKQEGIKNKLVPPAKENINVAVVARAFAQTRKVINAVIRKYGQFDQINIELATELKNSKFDRSKIEEGQKKFQSQKDKIFKEVQELRGGMTPSSSLLLKYRLWREQDERCVYSGRKISFEDLLDTGFLDIDHIIPYSKSMDDSFNNKVLCLAEENRNKKNDIPFNYYQRIDRDWNLLISIITSMKNMKIAKKSRLLKQELSDIEGFIERNINDTRYATRYIKDFLENNLEFKENEFIKVKVQARSGGLTSVLSYNWGMSKDREESYFHHAKDAIIVACSTQGMVQYISKISQQYENDKDKMKKIKDKTENCIPKPWDSFRADVEESIEGIFVSFAPRHKVTGSAHKETIYSKKHLEKERYVTVKKSLDKIKLSDLENIPCNENCGIIRVLKERLEKFKNDSLKAFADPVHMPTKCPNKKGPVIRSVKIKESNKTGIEVRKGLAERGEMVRVDVFIKDKKYYLVPIYVSDFKNKDLPNKAIAALKLENEWIMIDKTYSFKFSLFKDDLIKIKKKKEEIFGYFGGVHRSTGTIKIKSRHKPKEIDEGIGSRCLLDFRKFQVDVLGNYTEVKHEKRMPAYITRKDKKH

SEQ ID NO: 75 - protein, 1361 aa, Lactobacillus casei
MTKLGKPYGIGVDIGSNSIGFAAVDENSHLIRLKGKTVIGARLFEEGKAAADRRASRTTRRRLSRNRWRLSFLRDFFESHITPTGPNFFMRQKYSEISPKDKARYKYEKRLFNDRTDAEFYQQYPTMYHLRNRLLTDPSKADVREIYFAIHHILKSRGHFLTSGYAKDFNTNKVALNEIFPALQDAYAQVYPDLDITFDENKVNEFKTVLLNEKATPSDTQRALVNLLLAEDGDKDILKQQKQVLTEFAKAVVGLKTKLNVALGTEVDSSEATVWNFSLGQLDDKWAGIESAMTDEGTEILDQIRDLYRARLLNGIVPAGKTLSQAKVDDYAQHHEDLELFKDYLKQLEDDGTAKAIRQLYDRYIDGDDAKPFVREDFVKALTKEVTAHPNAKSPELLERLAQPDFMLKQRNKANGAIPVQMQQRELDQIIKNQSVYYDWLAAPNPVEKHRKSMPYQLDELLNFRIPYYVGPLVTAKEQKAAQGGVFAWMVRKDPDGNITPYNFDEKVDREASANTFIQRMKTTDTYLIGEDVLPKQSLLYQRYEVLNELNNVRVNNEKLSIEQKQQVIRELFERHNSVTIKQFAENLRAHGDYAHIPEIRGLADEKRFLSSLSTYRQLKSLLPDAIDDPAKQADIENIIAWSTVFEDAAIFKTKLKEINWLDSQTITKLSNIRYRGWGQFSHKFLNGLTLGNGHTIIQELFLSNNNLMQILTDETLQKKMTELNADKLKAANINDAIDDAYTSPSNKKALRQVLRVIEDIKRAADGQDPSWLYVETADGGGTPGKRTRARQHQLQEIYANAAHELIDSAVRGELEDKIADKADFNDRLVLYFMQGGRDIYTGTPLNIDQLSSYDIDHILPQSLIKDNSLDNRVLVHAIINREKNATFASTIYAQKMNATWRQWHEAGLISGRKLRNLQMRPDQIDKYASGFVARQLVETRQIIKLTEQIVAAQYPETKIIAVKAGLSHQLREELEFPKNRDVNHYHHAFDAFLAARIGTYLLKRFPNLQAFFTYGKFKKADVKKLRGFNFIRDITHAEDKIVVKDTGEVIWDKKRDVDELDRIYNFKRMLITHEVHFEKADLFKQTVYGAKDSKEAGGKKQLISKKKGYPVDIYGGYTQETGSYLSVVRLTKKAMYAVVKVSTRDAAKLAVAKSISEQKENETLNDIIDEKLSKISKNGKITHELFEVVLPRVGQKTLFKNSKYNLFLVNSDTYMHNYQELWMPREYQKMWKDISLSKYGDAQTEDQLDQIFGFIVSQVNSYFNLYDINQFRKKLNDAADKFATLPMRDTDDMQGKIATIGQLLIGLQANAARSDLRNLDIKTPLGLLQIPNGISLDSDTSVVYQSPTGLLEREVHLSDL

SEQ ID NO: 76 - protein, 1348 aa, Streptococcus equi
MKKPYTIALDIGTNSVGWVVVTDDYRVPTKKMKVLGNTERKTIKKNLIGALLFDSGDTAEGTRLKRTARRRYTRRKNRLRYLKEIFTEEMAKVDDGFFQRLEDSFYVLEDKEGNKHPIFANLADEVAYHKKYPTIYHLRKELVDNPQKADLRLIYLAVAHIIKFRGHFLIEGTLSSKNNNLQKSFDHLVDTYNLLFEEQRLLTEGINAKELLSAALSKSKRLENLISLIPGQKKTGIFGNIIALSLGLTPNFKANFGLSKDVKLQLAKDTYADDLDSLLAQIGDQYADLFLAAKNLSDAILLSDILTESDEITRAPLSASMVKRYREHHKDLVTLKTLIKDQLPEKYQEIFLDKTKNGYAGYIEGQVSQEEFYKYLKPILARLDGSEPLLLKIDREDFLRKQRTFDNGSIPHQIHLEELHAILRRQEVFYPFLKDNRKKIESLLTFRIPYYVGPLARGHSRFAWVKRKFDGAIRPWNFEEIVDEEASAQIFIEKMTKNDLYLPNEKVLPKHSLLYETFTVYNELTKVKYATEGMTRPQFLSADQKQAIVDLLFKTNRKVTVKQLKENYFKKIECWDSVEITGVEDSFNASLGTYHDLLKIIQDKDFLDNPDNQKIIEDIILTLTLFEDKKMISKRLDQYAHLFDKVVLNKLERHHYTGWGRLSGKLINGIRDKQSGKTILDFLKADGFANRNFMQLIHDSELSFIDEIAKAQVIGKTEYSKDLVGNLAGSPAIKKGISQTIKIVDELVKIMGYLPQQIVIEMARENQTTAQGIKNARQRMRKLEETAKKLGSNILKEHPVDNSQLQNDKRYLYYLQNGKDMYTGDDLDIDYLSSYDIDHIIPQSFIKNNSIDNKVLTSQGANRGKLDNVPSEAIVRKMKGYWQSLLRAGAISKQKFDNLTKAERGGLTQVDKAGFIQRQLVETRQITKHVAQILDSRFNTEFDDHNKRIRKVHIITLKSKLVSDFRKEFGLYKIRDINHYHHAHDAYLNAVVAKAILGKYPQLAPEFVYGDYPKYNSFKERQKATQKMLFYSNILKFFKDQESLHVNSDGEEIWNANKHLPIIKNVLSIPQVNIVKKTEVQTGGFYKESILSKGNSDKLIPRKNNWDTRKYGGFDSPTVAYSVLVIAKMEKGKAKVLKPVKEMVGITIMERTAFEENPVVFLEARGYREIQEHLIIKLPKYSLFELENGRRRLLASASELQKGNELFLPVDYMTFLYLAAHYHELTGSSEDVLRKKYFVDRHLHYFDDIIQMINDFAERHILASSNLEKINHTYHNNSDLPVNERAENIINVFTFVALGAPAAFKFFDATIDRKRYTSTKEVLNATLIHQSVTGLYETRIDLSQLGEN

SEQ ID NO: 77 - protein, 1341 aa, Ruminococcus lactaris
MGKGYYVGLDMGTGSVGWAVTDESYQILRRHGKAMWGVRLFESAKTAEERRMFRTGRRRLDRRGWRIEILQEIFAEEISRVDPGFFLRMKESKYYPEDKRDIQGNCPELPYTLFVDKTFTDKDFHKKYPTIYHLRKMLMETEDTPDMRLVYLALHHMMKHRGHFLLSGDISQVTEFKNTFNQFIENIRNEEMDFEIELDESAVQMIEETLKDKNLTRSAKKSKLVKGLNAKNVRDKAFLTLLSGGTVKLSDLFGMEELNEGERPKISFADNGYEEYAAVVEMELGELYYIVESAKAVYDWAILSDILGGSTSVSDAKVRAYEKHKADLKYLKAVVKEYFPKEVYNAVFVESSDKLNNYPAYIGMTKKNGKKVSLEGKRCSREEFMDFLKKNIVVKLPDEEAKMYLQSELEKDSFLPKQVNKDNGVIPYQVHKYELKKILDNLGDKIPFLKENAEKIEKLFSFRIPYYVGPLRTGNGENSKFAWAERKSTEKIYPWNFENVIDVEQSAENFIRRMTNKCTYLIGEDVLPKDSLLYSKFMVLNELNNLRLDGQKISVELKQKIYRDVFCRSRKVTQKKLKSYLIREGIAGKNVELTGIDGDFKGSLTAYHDFKEKLIDVELTQKEKEEIILNIVLFGDDKKLLKQRLKKKFPQLTEKQINTVTALSYKGWGRLSKKLLEEVTVPAPETGEVWNIITALWETNDNFMQLLSKEYQFSDRIEEFNEEKADPEVSYQTIEDLYVSPAVKRQIWQTLQIIQEIEKVMGEKPKRVFVEMAREKQENKRTESRKKTLSDLYTKCKKEEPEWIEALCTSLEKHEEHQLRSDKLYLYYTQKGRCMYSGEPIDLEDLWDNTKYDIDHIYPQSKTMDDSLKNRVLVKKEYNAKKSDTYPIAADIQKKMMPFWKSLLTGGFIPKEKYDRLVRNNPLDANELAGFIERQIVETRQSTKAVAEILKKILPDTEIVYVKAKTVSKFRQDFDFIKVRDMNDLHHAKDAYLNIVVGNVYFVKFTKNAAWFVKENPGRTYNLEKMFIWDVARDGEIAWKAGKSGSIVQVRAMMEKNHILVTRRSYEVKGGLFDQQILKKGKGQVPVKESDERLRDIGKYGGYNKAAGVYFMLVSSKDKKGKEQRTIEFVPIYLKDRVEKDMESARNYLMEERGLREPKILIKKIKIDTLFKVDGFYMWLSGRTSNQLIFKGANQLILSKEDMKTLKKVVKYIQRQKEDKNVKISMRDGITEEELLKLYETFLDKIRHSIYGARLSSQEKTLVNGKEKFIDLSVEAKCQVLYEILHLFQCQSGAANLKMIGGPASAGILVMNNNISKCKNISIVNQSPTGIYEKEIDLLRV

SEQ ID NO: 78 - protein, 1003 aa, Gluconacetobacter diazotrophicus
MIDESLTFGIDLGIGSCGWAVLRRPSAFGRKGVIEGMGSWCFDVPETSKERTPTNQIRRSNRLLRRVIRRRRNRMAAIRRLLHAAGLLPSTDSDALKRPGHDPWELRARGLDKPLKPVEFAVVLGHIAKRRGFKSAAKRKATNISSDDKKMLTALEATRERLGRYRTVGEMFARDPDFASRRRNREGKYDRTTARDDLEHEVHALFAAQRRLGQGFASPELEEAFTASAFHQRPMQDSERLVGFCPFERTEKRAAKLTPSFERFRLLARLLNLRITTPDGERPLTVDEIALVTRDLGKTAKLSIKRVRTLIGLEDNQRFTTIRPEDEDRDIVARTGGAMTGTATLRKALGEALWTDMQERPEQLDAIVQVLSFFEANETITEKLREIGLTLAVLDVLLTALDAGVFAKFKGAAHISTKAARNLLPHLEQGRRYDEACTMAGYDHAASRLSHHGQIVAKTQFNALVTEIGESIANPIARKALIEGLKQIWAMRNHWGLPGSIHVELARDVGNSIEKRREIEKHIEKNTALRARERREVHDLLDLEDVNGDTLLRYRLWKEQGGKCLYTGKAIHIRQIAATDNSVQVDHILPWSRFGDDSFNNKTLCLASANQQKKRSTPYEWLSGQTGDAWNAFVQRIETNKELRGFKKRNYLLKNAKEAEEKFRSRNLNDTRYAARLFAEAVKLLYAFGERQEKGGNRRVFTRPGALTAALRQAWGVESLKKQDGKRINDDRHHALDALTVAAVDEAEIQRLTKSFHEWEQQGLGRPLRRVEPPWESFRADVEATYPEVFVARPERRRARGEGHAATIRQVKERECTPIVFERKAVSSLKEADLERIKDGERNEAIVEAIRSWIATGRPADAPPRSPRGDIITKIRLATTIKAAVPVRGGTAGRGEMVRADVFSKPNRRGKDEWYLVPVYPHQIMNRKAWPKPPMRSIVANKDEDEWTEVGPEHQFRFSLYPRSNIEIIRPSGEVIEGYFVGLHRNTGALIPTPVGPDSYVIA

SEQ ID NO: 79 - protein, 1368 aa, Streptococcus pyogenes
MDKKYSIGLDIGTNSVGWAVITDDYKVPSKKFKVLGNTDRHSIKKNLIGALLFDSGETAEATRLKRTARRRYTRRKNRICYLQEIFSNEIAKVDDSFFHRLEESFLVEEDKKHERHPIFGNIVDEVAYHEKYPTIYHLRKKLADSTDKADLRLIYLALAHMIKFRGHFLIEGDLNPDNSDVDKLFIQLVQTYNQLFEENPINASRVDAKAILSARLSKSRRLENLIAQLPGEKRNGLFGNLIALSLGLTPNFKSNFDLAEDAKLQLSKDTYDDDLDNLLAQIGDQYADLFLAAKNLSDAILLSDILRVNTEITKAPLSASMIKRYDEHHQDLTLLKALVRQQLPEKYKEIFFDQSKNGYAGYIDGGASQEEFYKFIKPILEKMDGTEELLAKLNREDLLRKQRTFDNGSIPHQIHLGELHAILRRQEDFYPFLKDNREKIEKILTFRIPYYVGPLARGNSRFAWMTRKSEETITPWNFEEVVDKGASAQSFIERMTNFDKNLPNEKVLPKHSLLYEYFTVYNELTKVKYVTEGMRKPAFLSGEQKKAIVDLLFKTNRKVTVKQLKEDYFKKIECFDSVEISGVEDRFNASLGTYHDLLKIIKDKDFLDNEENEDILEDIVLTLTLFEDREMIEERLKTYAHLFDDKVMKQLKRRRYTGWGRLSRKLINGIRDKQSGKTILDFLKSDGFANRNFMQLIHDDSLTFKEDLQKAQVSGQGDSLHEHIANLAGSPAIKKGILQTVKVVDELVKVMGRHKPENIVIEMARENQTTQKGQKNSRERMKRIEEGIKELGSDILKEYPVETTQLQNEKLYLYYLQNGRDMYVDQELDINRLSDYDVDHIVPQSFLKDDSIDNKVLTRSDKNRGKSDNVPSEEVVKKMKNYWKQLLNAKLITQRKFDNLTKAERGGLSELDKAGFIKRQLVETRQITKHVAQILDSRMNTKYDENDKLIREVRVITLKSKLVSDFRKDFQFYKVREINNYHHAHDAYLNAVVGTALIKKYPKLESEFVYGDYKVYDIRKMIAKSEQEIGKATAKYFFYSNIMNFFKTEITLANGEIRKRPLIETNGETGEIVWDKGRDFATVRKVLSMPQVNIVKKTEVQTGGFSKESILPKRNSDKLIARKKDWDPKKYGGFDSPTVAYSVLVVAKVEKGKSKKLKSVKELVGITIMERSSFEKDPVDFLEAKGYKEVRKDLIIKLPKYSLFELENGRKRMLASAGELQKGNELALPSKYVNFLYLASHYEKLKGSPEDNEQKQLFVEQHKHYLDEIIEQISEFSKRVILADANLDKVLSAYNKHRDKPIREQAENIIHLFTLTNLGAPAAFKCFDTTIGRNRYKSIKEVLDATLIHQSITGLYETRIDLSQLGGD

SEQ ID NO: 80 - protein, 1504 aa, Bacteroides dorei
MKNIVGLDLGTNSIGWAVVNGSVNDDGSEQLVKIQASGSRIIPMDAAMIGDFNKGNSISQTAERTRLRGVRRLSERYLLRRERLHRILDILGFLPFHFAQDLDRHGKIVKGKEPKLAWRKNEAGQFEFIFQDSFKEMLEDFKLNYPNLITDDKKVPYDWTIYYLRKKGLTSKISKEELAWILLNFNQKRGYYQLRGEEEEENKDKLVEFYALKVVAVEDSGEKKGKDIWYNVHLENGWVYRRTSNMSLDWVGKTKEFIVTTDLEKDGTPKKDKEGNVKRSFRAPKEDDWSLVKKKTEADIDQTHKTVGAYIYDTLLGNPSQKIRGRLVRTIERKYYKEELKLILEKQKEFHLELQDRALYAACIEELYPINEAHRNNVGNRDFTYLFLEDILFYQRPLKSKKSLIDNCPYEENQGLDKETGEIKSFPVKCIAKSHPLFQEFRLWQFIINLRIYRKDLAQDVDVTNELLKTEEDYVALFDWLNGKKEIDQKAFLKYPVFGLKKEIENYRWNYVQDKPYPCNETRSLMLARLEKCDISIEFLTKENEEALWHILYSVEDKNEIVKALQKFADKHDLNASFVDVFQKFPPFKKEYGSYSAKAIKKLLPLMRMGKYWSENSIDKGTRERIDKIITGEYDEKIENRVREKAIHLADVSDFKGLPLWLVCYIVYGRHSEAKEIIQWKSPADIDSYLRSFKQHSLRNPIVEQIIIETLRVVRDIWKQVGNIDEIHVELGREMKNPADKRKKMTQQMSENENTNLRIKYLLTEFLNPEYEVENVRPYSPSQQDILRIYEEGVLNSVSDLPEEISDILKKFTETDLKKRPSRSEVLRYKLWLEQKYRSPYTGEVIPLGKLFTPAYEIEHVIPQSYYFDDSFSNKVICEAEVNKLKSNLLGHEFIVKHHGEIVELPFGKKVRIFTVDEYEQFVKDNYSRTRSKMKKLLMDDIPEEFVTRQLNDSRYISKVVKSLLSNIVREKGEEEAISKNVIPCTGGVTDRLKKDWGINEVWNKIILPRFQRLNELTGTNKFTTKNVGIQEIPTMPLELQKGFNKKRIDHRHHAMDAIIIACANRNIINYLNNKSATAKAELSRYDLQKMLCDKAKTDNNGNYKWVIRKPWASFTQDTYLALENIIVSFKQNLRVINKATNRFLHYNEEGKKIFVKQGKGDNWAIRKSMHKDTVFGEVNLRRIKTVALNEAMKNPQSIVVKDFKRKLLELWNLGFDAKRIKKYFEDNRETWSDINLSKIEVYYFSKDTKDRFFATRKPLDTSFDRKKIENNITDTGIQKILLRHLELKDNNPDIAFSPDGIDEMNRNIIQLNNGKYHQPIIKIRWYEQADKFAVGQTGNKSSKFVEAAKGTNLFFAVYESNILDKKTNTIIKKRNYATIPLNVAIERQKQGLPVAPEDENGNDPIFVLSPNDLVYLPTDDELANGIIAQPLDRGRIYKMVSSSGEQCFFIKHIVANVLVDKFEFSPLNKMERALTGEMIKMICIPIKVDRLGNVLESSSSYKK

SEQ ID NO: 81 - protein, 1426 aa, Capnocytophaga sputigena
MKNILGLDLGITSISFAHIVEDENKEKSEIKELGVRIVSLTTDEQSDFEKGKSITTNANRTLKHGARLNLDRYQQRRKYLIDLLQKANLITSSSILAENGKNTTHSTWQLRAKAVTERIEKEEFARVLLAINKKRGYKSSRKAKTEDEGQAIDGMAIAKRLYDENLTPGQLSLQLLQQNKKLLPDFYRSDLQREFDLVWNFQKQFYPDILTDSFYKELQGKGKDATSKAFSKRYHFDTAENKGSKESVRLQAYQWRAEAISKQLSKEEVAYVLTEINNNLNNASGYLGAISDRSKELYFNRQTVGQYLYAQLQENRHNSLKNKVFYRQDYLDEFERIWETQASFHKELTDELKKQIRDVVIFYQRKLKSQKGLISFCEFESKEIEIEKDGKTITKTIGARVVPKSSPLFQEFKIWQILNNVTCKRKGIRKKKSSAKSTELDLFNEPSQTIFSLDMECKQLLFDELNLKGDLKSDKVLKLLGYSPQEWEINYNQLEGNRTQKALYEAYLKIVEMEAHDVKDILQIKSAKDDWSLDESPLSASEIKEKVKDIFQALGICTKILYFDPLLPVKEFEKQDSYQLWHLLYSYESDDSTSGNETLYRILEKKYAFKREHARILANVALQDDYGSLSTKAIRKIYPNIKENQYSKACELAGYKHSKLSLTTEELEARELKNIIPLLKKNALRNPVVEKILNQMINVVNALIEKNSERDAEGKITKYFHFDEIRIELARELKKNAQKRYEMTQNINKAKLEHQKISEILQKKFGIKNPTKSDIIRYRLYQELEHNGYKELYTNAPIARDMLFSKNIEIEHIVPKARVFDDSFSNKTLTFHRINSNKGEYTAFDYITSLNSEEELNQYLTRVENAYKTKSISLTKYKNLLKKASEIGDGFINRDLRDTQYIAKKAKEILFQVTKNVLSTSGSITDRLREDWGLVDVMKELNMPKYQSLGLTEVEERKEGNKVTVIKNWTKRNDHRHHAMDALTVAFTKPSYIQYLNHLNARKDENNKNYSVILAIEEKETIKVPTNNGKNKRVFIEPIPNFRQVAKKHLEEIFISHKAKNKVVTKNVNKPAGTDKQQITLTPRGQLHKETIYGKYQYYVNKEEKVGVKFDERTITKVSNPLYREALLKRLQANDNDPKKAFTGKNALSKNPIYLDETKTKTLPEKVNLTYLEEDFSIRKDISPDNFKDLKSIEKVIDQGVKRILIKRLQDYDNDPKKAFVDLEKNPIWLNKEKGIAIKRVTISGVSNAQPLHIGKDHLGKTTLNKEGNEIPVDYVSTGNNHHVAIYRDKEGNLQEQIVSFFEAVVRTQQGLPIIDKTYKQEEGWQFLFTMKQNEMFVFPNATTGFNPAEIDLLDPKNKKLISPNLFRVQKIATKDYFFRHHLETNVETDNVLKNTTWKREGLSGLKDIVKVRINHLGDIVSIGEY

SEQ ID NO: 82 - protein, 1443 aa, Parabacteroides johnsonii
MIKLLYLEKLKQYTMKKILGLDLGTSSIGWALVNEAENSDEVSSIIKLGVRVNPLTVDEMQNFEKGKSITTNADRTLKRSMRRNLQRYKLRRDALIELLKKVGFITDKTILSEQGNRTTFETYRLRAKAAEEEISLKELARVLLMINKKRGYKSSRKAKGEEEGALIDGMEIAKKLYDEDLTPGQLCLQLLESGKKFFPDFYRSDLQEEFNKIWDFQKQFNLFSFCDVAKEEVKGKNKSQTWAILAKYFVETKKVNVWNEHEAQTENREEVYKLVGLKRTVKGEELKKENYRWRVQALTEQLDLEKIAVVLQEINGQISASSGYLGAISDRSKVLYFNRQTVGQYQMAELNKNPNMSLRNMVFYRQDYLDEFNVIWEKQAEFHKELTPELKKEIRDIIIFYQRRLKSQKGLISFCEFENREVVVEKEGKKQTKIIGCKVIPRSHPLFQEFKIWQTLNNIEVFVGEKKGKRKKSNVSSDLFGDTEDALITEGRRFLYQEEKKILAKELSIKKGLTKAEILRLLFENPQELDINFKQIDGNQTGFALFSAYSNMIEKYGYEPLDFKKPAEDLISQLKTVFTDLGWNTDLLFIDLDKENKEWEKQPYFRLWHLLYSFEGDNTPTGNGKLIEKIMQLCGIEKEYAIELANVSLQDDYGSLSAKAIKKILLYLKEGNQYDMACEYAGYRHSKSSLTKEEIENKVLKDKLEILPKNSLRNPVVEKILNQMVNVINTVMEVYGRPDEIRVELARELKKSAKEREELTKAVAKNTREHEEIRKVLQSEFGMINVSRNDIIRYKLYEELKDNGYKTLYSNQYIPREKLFSKEIDIEHIIPQSRLFDDSLSNKTLEYKSINIEKGNKTAYDFVKEKYGEEGLQQYLNRCENLCKDKKAKLRKLKMELNEIPDGFIDRDLRNTQYIAKKALSMLTEICRRVVATTGSITDKLREDWQLVDVMKELNLPKYEALGLVEVYEDKDGRKIKRIKDWTKRNDHRHHAMDALTVAFTKDVFIQYFNNKNAAWESDSKEHTNIVGIKTRYFESGKAVPPIPLGQFRVEAKCHLENLLVSIKAKNKVVTTNVNCIKKKGGTYKNTQQTPRGQLHLETIYGSHNQYVTKIEKVNASFDAVKIATVSKQDYRNALLKRLEVFGNDPKKAFTGKNSLEKNPIYLDRAQTIQVPDKVQTVELETAYTIRKPVDPTLNVDKVVDKKIRLILEQRLKEYGGDAKKAFVNLDENPIWLNEEKGISIKRVTIRGISKAQALHDKKDKDGNFILDETGKRIPVDFVNTGNNHHVAIYRKPVLDKKGQVIFDDEGNPMYELDEDVVPFFEAVTRANLGIPIIDKDYKKSEGWQFLFSMKQNEYFVFPNEKTGFNPKEVDLLDPDNYAMISPNLFRVQKIGLNDYTFRHHLETTIQNDLKFITWIRCGKSGIKDIVKVRINHIGQIVSVGEY

SEQ ID NO: 83 - protein, 984 aa, Campylobacter jejuni
MARILAFDIGISSIGWAFSENDELKDCGVRIFTKVENPKTGESLALPRRLARSARKRLARRKARLNHLKHLIANEFKLNYEDYQSFDESLAKAYKGSLISPYELRFRALNELLSKQDFARVILHIAKRRGYDDIKNSDDKEKGAILKAIKQNEEKLANYQSVGEYLYKEYFQKFKENSKEFTNVRNKKESYERCIAQSFLKDELKLIFKKQREFGFSFSKKFEEEVLSVAFYKRALKDFSHLVGNCSFFTDEKRAPKNSPLAFMFVALTRIINLLNNLKNTEGILYTKDDLNALLNEVLKNGTLTYKQTKKLLGLSDDYEFKGEKGTYFIEFKKYKEFIKALGEHNLSQDDLNEIAKDITLIKDEIKLKKALAKYDLNQNQIDSLSKLEFKDHLNISFKALKLVTPLMLEGKKYDEACNELNLKVAINEDKKDFLPAFNETYYKDEVTNPVVLRAIKEYRKVLNALLKKYGKVHKINIELAREVGKNHSQRAKIEKEQNENYKAKKDAELECEKLGLKINSKNILKLRLFKEQKEFCAYSGEKIKISDLQDEKMLEIDHIYPYSRSFDDSYMNKVLVFTKQNQEKLNQTPFEAFGNDSAKWQKIEVLAKNLPTKKQKRILDKNYKDKEQKNFKDRNLNDTRYIARLVLNYTKDYLDFLPLSDDENTKLNDTQKGSKVHVEAKSGMLTSALRHTWGFSAKDRNNHLHHAIDAVIIAYANNSIVKAFSDFKKEQESNSAELYAKKISELDYKNKRKFFEPFSGFRQKVLDKIDEIFVSKPERKKPSGALHEETFRKEEEFYQSYGGKEGVLKALELGKIRKVNGKIVKNGDMFRVDIFKHKKTNKFYAVPIYTMDFALKVLPNKAVARSKKGEIKDWILMDENYEFCFSLYKDSLILIQTKDMQEPEFVYYNAFTSSTVSLIVSKHDNKFETLSKNQKILFKNANEKEVIAKSIGIQNLKVFEKYIVSALGEVTKAEFRQREDFKK

SEQ ID NO: 84 - protein, 1082 aa, Neisseria meningitidis
MAAFKPNPINYILGLDIGIASVGWAMVEIDEDENPICLIDLGVRVFERAEVPKTGDSLAMARRLARSVRRLTRRRAHRLLRARRLLKREGVLQAADFDENGLIKSLPNTPWQLRAAALDRKLTPLEWSAVLLHLIKHRGYLSQRKNEGETADKELGALLKGVADNAHALQTGDFRTPAELALNKFEKESGHIRNQRGDYSHTFSRKDLQAELILLFEKQKEFGNPHVSGGLKEGIETLLMTQRPALSGDAVQKMLGHCTFEPAEPKAAKNTYTAERFIWLTKLNNLRILEQGSERPLTDTERATLMDEPYRKSKLTYAQARKLLGLEDTAFFKGLRYGKDNAEASTLMEMKAYHAISRALEKEGLKDKKSPLNLSPELQDEIGTAFSLFKTDEDITGRLKDRIQPEILEALLKHISFDKFVQISLKALRRIVPLMEQGKRYDEACAEIYGDHYGKKNTEEKIYLPPIPADEIRNPVVLRALSQARKVINGVVRRYGSPARIHIETAREVGKSFKDRKEIEKRQEENRKDREKAAAKFREYFPNFVGEPKSKDILKLRLYEQQHGKCLYSGKEINLGRLNEKGYVEIDHALPFSRTWDDSFNNKVLVLGSENQNKGNQTPYEYFNGKDNSREWQEFKARVETSRFPRSKKQRILLQKFDEDGFKERNLNDTRYVNRFLCQFVADRMRLTGKGKKRVFASNGQITNLLRGFWGLRKVRAENDRHHALDAVVVACSTVAMQQKITRFVRYKEMNAFDGKTIDKETGEVLHQKTHFPQPWEFFAQEVMIRVFGKPDGKPEFEEADTPEKLRTLLAEKLSSRPEAVHEYVTPLFVSRAPNRKMSGQGHMETVKSAKRLDEGVSVLRVPLTQLKLKDLEKMVNREREPKLYEALKARLEAHKDDPAKAFAEPFYKYDKAGNRTQQVKAVRVEQVQKTGVWVRNHNGIADNATMVRVDVFEKGDKYYLVPIYSWQVAKGILPDRAVVQGKDEEDWQLIDDSFNFKFSLHPNDLVEVITKKARMFGYFASCHRGTGNINIRIHDLDHKIGKNGILEGIGVKTALSFQKYQIDELGKEIRPCRLKKRPPVR

SEQ ID NO: 85 - protein, 1021 aa, Clostridium cellulolyticum
MKYTLGLDVGIASVGWAVIDKDNNKIIDLGVRCFDKAEESKTGESLATARRIARGMRRRISRRSQRLRLVKKLFVQYEIIKDSSEFNRIFDTSRDGWKDPWELRYNALSRILKPYELVQVLTHITKRRGFKSNRKEDLSTTKEGVVITSIKNNSEMLRTKNYRTIGEMIFMETPENSNKRNKVDEYIHTIAREDLLNEIKYIFSIQRKLGSPFVTEKLEHDFLNIWEFQRPFASGDSILSKVGKCTLLKEELRAPTSCYTSEYFGLLQSINNLVLVEDNNTLTLNNDQRAKIIEYAHFKNEIKYSEIRKLLDIEPEILFKAHNLTHKNPSGNNESKKFYEMKSYHKLKSTLPTDIWGKLHSNKESLDNLFYCLTVYKNDNEIKDYLQANNLDYLIEYIAKLPTFNKFKHLSLVAMKRIIPFMEKGYKYSDACNMAELDFTGSSKLEKCNKLTVEPIIENVTNPVVIRALTQARKVINAIIQKYGLPYMVNIELAREAGMTRQDRDNLKKEHENNRKAREKISDLIRQNGRVASGLDILKWRLWEDQGGRCAYSGKPIPVCDLLNDSLTQIDHIYPYSRSMDDSYMNKVLVLTDENQNKRSYTPYEVWGSTEKWEDFEARIYSMHLPQSKEKRLLNRNFITKDLDSFISRNLNDTRYISRFLKNYIESYLQFSNDSPKSCVVCVNGQCTAQLRSRWGLNKNREESDLHHALDAAVIACADRKIIKEITNYYNERENHNYKVKYPLPWHSFRQDLMETLAGVFISRAPRRKITGPAHDETIRSPKHFNKGLTSVKIPLTTVTLEKLETMVKNTKGGISDKAVYNVLKNRLIEHNNKPLKAFAEKIYKPLKNGTNGAIIRSIRVETPSYTGVFRNEGKGISDNSLMVRVDVFKKKDKYYLVPIYVAHMIKKELPSKAIVPLKPESQWELIDSTHEFLFSLYQNDYLVIKTKKGITEGYYRSCHRGTGSLSLMPHFANNKNVKIDIGVRTAISIEKYNVDILGNKSIVKGEPRRGMEKYNSFKSN

SEQ ID NO: 86 - protein, 1131 aa, Acidovorax ebreus
MAQHVFGLDIGIASVGWAILGEQRIIDLGVRCFDKAETAKEGDPLNLTRRQARLLRRRLYRRAWRLTQLSRLLKRKGLIADAKLFAKAPSYGDSAWELRRQGLDRLLTPLEWARVIYHQCKHRGFHWTSKAEEAKADSDAEGGRVKQGLAHTKALMQAKNYRSAAEMVLAEFPDAQRNKRGQYDKALSRVLLGEELALLFATQRRLGNPHASDFFEKLILGDGDRKSGLFWQQKPALSGADLLKMLGKCTFEKGEYRAPKASFSVERHVWLTRLNNLRIVVDGRSRPLNEAERQAALLLPYQTETSKYKTLKNAFIKAGLWGDGVRFGGLAYPSQAQIDAEKTKDPEDQFLVKLPAWHELRKAFKAAGHEALWQQISTPALDGDPTLLDQIATVLSVYKDGAEVVQQLRQLALPEPAASIAVLEKISFDKFSSLSLKALRRIVPLMQSGLRYDEAVAQIPEYGHHSQRIEPGAAKHLYLPPFYEAQRKYAGKGDHIGSMQFRDDADIPRNPVVLRALNQARKVVNALIREYGSPIAVNIEMARDLSRPLDERNKVKRAQEEFRDRNDRARSEFERDFGYKPKAAAFEKWMLYREQLGQCAYSQQPLDIQRVLDDHNYAQVDHALPYSRSYDDSKNNKVLVLTHENQNKGNRTAFEYLTSFPDGEDGERWRTFVAWVQGNKAYRMAKRNRLLRKNYGVDESKGFIDRNLNDTRYICKFFKNYVEEHLQLAARADGDTARRCVVVNGQLTAFLRARWGLTKVRGDSDRHHALDAAVVAACTHGMVKALADYSRRKEISFLQEGFPDPETGEILNPAAFDRARQHFPEPWTHFAHELKARLFTDDLAALREDMQRLGSYTTEDLGRLRTLFVSRAPQRRSGGAVHKETIYAQPESLKQQGGVIEKILLTSLKLQDFDKLLNPESNDHFVEPHRNERLYAAIRQRLEQFGGRADKAFGPDNLFHKPDKNNQPTGPVVRSIKLVRGKQTGIPIRGGLAKNDSMLRVDIFTKAGKFHLVPVYVHHRVTGLPNRAIVAFKDEDEWTLIDESFAFLFSVYPNDYVKVTLKKEQQSGYYSGADRSTGAMNLWAHDRAASVGKDGLIRGIGVKTALSVEKFNVDVLGRIYLAPPETRSGLA

SEQ ID NO: 87 - protein, 1122 aa, Streptococcus suis
MSNGKILGLDIGIASVGVGVIDAQTGEIIHASSRIFPSANAANNAERRTFRGSRRLIRRKKHRIKRLDDLFNDFHINLDGEMSTDNPYVLRVKGLSQKLTVEELYISIKNIMKRRGISYLDDAESDNEAGRSDYAKAIERNRQLLTSKTPGEIQLERLEKYGQLRGNFTIIDEEGQSQQIINVFSTSDYVKEVEKILDCQKMYHKFISDEFCDKLIELLREKRKYYVGPGNEKSRTDYGIYRTDGTTLENLFGILIGKCTFYPDQYRSSRASYTAQEFNFLNDLNNLTVPTETKKLSQEQKEFLVNYAKETSVLGAGKILQQIAKLADCKVEDIRGYRLDNKDKPELHTFETYRAMKGLVPLVDIGVLSREQLDILADILTLNTDFEGIREALKKQLPNVFDEKQVKGLASFRKSKSQLFAKGWHNLSQKIMLEVIPELYATSDEQMTILTRLGKFEKSSVAEYPSSINVDEITDEIYNPVVAKSIRQTIKIINASIKKWGEFDQIVIEMPRDRNEDEEKKRIADGQKANAKEKADSILRAAELYCAGKVLPDYVYNGHNQLATKIRLWYQQGERCIYTGQPISIHDLIHNQNQYEIDHILPLSLTFDDSLSNKVLVLATANQEKAQRTPYNYLKSATSAWSYREFKDYVTKRKGIGKKKCEYLTFEEDINGFEVRSKFIQRNLVDTRYASKVILNALQDYFKISGIQTKVSVVRGQFTSQLRHKWGIEKTRETYHHHAVDALIIAASSQLRLWKKQESPLVVDYQEGRQVDLETGEILELTDEQYKELVYQPPYQGFVNTISSSAFDNEILFSYQVDSKVNRKISDATIYATRNAQLGKDKTEGIYVLGKIKDIYTQAGYEAFLKRYTKDKTSFLMYHKDLDTWEKVIEIILRDYREYDEKGKEIGNPFERYRRENGYVKKYSRKGNGTAIKSLKYYDNKLGNHIDITPENSRNAVVLQSLKPWRTDVYFNKETGKYEFLGIKYSDLSFEKGTGEYGISQEKYDSIKIAEGVAKKSIFKFTLYKQDLLFIKDIENNFGKLLRFTSKNDTSKHYVELKPYDKNKFGTEEPLLPVLGNVAKSGQCIKGLNKSNISIYKVRTDILGYRHFIKQEGEHPQLKFKK

SEQ ID NO: 88 - protein, 1509 aa, Bacteroides coprophilus
MKKTLGLDLGTNSIGWAVINSNIDSEGKEKLVGISSCGSRIIPMDATTLGDFGKGNTKSPVAERTRLRGIRRLLERSLLRRERLHRVLSVMGFLPEHYASQLDRYGKFLPETEPKLAWYKDDSGRYQFLFQKSFHEMLEDFRQHQPELVAGEKKIPYDWTIYYLRKKALSQEITKEELAWILLNFNQKRGYYQLRGEEEQEENNKSVEYHALKVVSVEDSGERKGKDIWYNVTLENGWVYRRASNIPLDWTGKVKEFVVTTELDDAGNPKKDKEGNVKRSFRAPKEDDWGLLKTRTQAQIDESGKTVGTYIYESLLCMPNQKIRGKLVRTIERKYYKDELRQILVKQSEFHAALQDHNLLLSCIEELYPNNEAHRRLLSASSFIYFLIEDILFYQRPLKSQKGLIDNCPYESHIYKDKKDGSLHHVPLKCVSKSHPLFQEFRLWQFLSNLRIYQRERMMDGSLKLDVDVTREFLPSEEDYVKLFDWLNERKEISQKFLLAYKPFGLKKNEQANYRWNYVEDKSYPCNETRAEIKSRLSKAGVPEEFLTEEKEEALWHILYSISDKKELTKALGTFAAKNCLNESFVEVFAKIPPFESNYAAYSLKAIRKLLALMRMGKYWNEQAIDRQTRDRIEKILTGEYDETIRSRVREKAMLLTDISSFRGLPLWLACYIVYDRHSESKELVKWETPADIDHFLSKFKQNSLRNPIVEQVITESLRTVRDIWKQEGKIDEIHVELGREMKNPAKERARITAQVQENENTNLRIKALLAEFMNPEFEIENVHPYSPGQQEILRIYEDGVLSGIAEKDLPDDITAILKKFRENDVKKRPTTSEVLRYKLWLEQRYRSPYTGRVIPLGKLFTPAYEIEHVIPQSRYFDDSISNKVICESAVNKLKDNCLGYEFIKKHSGEMVELGNGETVPVFSVEEYERFVKESYFGNSKKMKKLLLEDIPDSFIERQLNDSRYISRVVTSLLSNLVCEEGEQDGLSKNVIVCTGGITDRLKKDWGVQEVWNRIILPRFLRLNEITGRTDFTSTSVNGHLLPALPLYLQKGFNKKRIDHRHHAMDAIVIACANRNIVNYLNNSSARKNSEISRYDLQRLLCEKVKTDANGNYKWILRKPWETFTQDVYAALTNIVVSFKQNLRVINRTTNYYQHYNEAGEKRMIPQTKGDRWAIRKPMHKDTVYGEVNLRKEKTLPLRDVVKNPSIVVDKSLKNKLYELLKSQYDLKAIAKYFETHQDVWADVNLKKIKVYYFTKETNERFFATRKSLDPSFDQKKIEEEVTDTGVQKILLHHLQQNNNDPDMAFSPDGIDRMNQNMTILNDGKWHQPIYKVRTYEKADKFAVGESGNKAKKFVEAAKGTNLFFAVYESVQEDEAIGKQVCKRTFATIPLNEVIKRKKQGLPAAPEDLNGNLPKFVLSPNDLVYLPTEEERNSSRIIQPLDRERIYKMVSSSGSQCFFIKVFVANSIWDKNEYSSLNKMERAITNEMIKEICVPIKIDRLGNVSLIQI

SEQ ID NO: 89 - protein, 1219 aa, Bacteroides cellulosilyticus
MKEEVRGKNRSQTWAILAKFFVWSEKESVWNEKEARTEERVKEYKLVGLKRDTKGNELKLENYRWRVQALSEQLNPEIVAIVLQEINGQISASSGYLGAISDRSKQLYFNRQTVGQYLMSELEKDPNVSLRNRVFYRQDYLDEFDRIWEKQAEFHEELTVELKKEIRDIIIFYQRRLKSQKGLISFCEFEKREVVVEEDGRKKNKTVGCRVIPRSHPLFQEFKIWQTLNDIEVFAWDKQSKRKKADKSSILFDNSEDALLVEGKRFLYQEEKELLAKELFVKESMKKAEVLKLLFENYQELDLNFKQIDGNHTGFALFSAYSKMIEKYGYEPVDFKRSADEIIEKLETIFTNLGWNTELLSIDLSKEDKELERQSYFRLWHLLYSFEGDNTPTGNGKLLEKIMQLCDVEKEYAVELANVSFQEDYGSLSAKAIKKILPYLKEGNQYDVACDYAGYRHSRSSLTKDEIENKILKDKLEILPKNSLRNPVVEKILNQMVNLINTLIDTYGKPDEIRVELARELKKNAKEREELTKSIARNTREHDEIRQLLRTEFGMMNVSRNDIIRYKLYEELKDNGYKTLYSNEYIPREKIFSKEIDIEHVIPQARLFDDSLSNKTLEYRAINIEKGNKTAYDFVKEKYGNDGLEKFLNRCETLFKDKRTKLRKLKMEEKDIPEGFIDRDLRNTQYISKKAFAMLNEISRRVVATTGSITDKLREDWQLVDLMKELNLPKYEKLGMVEMFEDKDGRKIKKITDWTKRNDHRHHAVDALTVAFTKDVFIQFYNNKNAAWMPASKEHANITGIKARYFENGKALAPMPLAQFRAEAKRHLENLLVSIKAKNKVITSNVNRTKNKNGENRKLQQTPRGQLHLETVYGSHRQYATKIEKVNAAFDVTKIATVSKLAYRNALLKRLEAFGNDPKKAFTGKNTLEKNPLYLDENQTEMVPEKVQTVEFETVYTIRKPIDPNLSIDKVVDVKIRSVLEKRLKEYGGDAKKAFVNLDENPIWLNEAKGISIKRVSIRGISNAQSLHEKKDKDGNLILGKEGRKIPVDFVNTGNNHHVAIYKKPVLDKVGQVVLDEEGNPKYELDEVVVSFFDAVTRANLGQPIIDKDYRRSEGWQFLFSMKQNEYFVFPNDKTGFNPKEVDLLNPENYALISPNLFRVQKFAYKNYVFRHHLETTIKDTSSTLKGITWTDFRSSKGLDKIVKVRVDHIGQIVSIGEY

SEQ ID NO: 90 - protein, 1329 aa, Catenibacterium mitsuokai
IVDYCIGLDLGTGSVGWAVVDMNHRLMKRNGKHLWGSRLFSNAETAANRRASRSIRRRYNKRRERIRLLRAILQDMVLEKDPTFFIRLEHTSFLDEEDKAKYLGTDYKDNYNLFIDEDFNDYTYYHKYPTIYHLRKALCESTEKADPRLIYLALHHIVKYRGNFLYEGQKFNMDASNIEDKLSDIFTQFTSFNNIPYEDDEKKNLEILEILKKPLSKKAKVDEVMTLIAPEKDYKSAFKELVTGIAGNKMNVTKMILCEPIKQGDSEIKLKFSDSNYDDQFSEVEKDLGEYVEFVDALHNVYSWVELQTIMGATHTDNASISEAMVSRYNKHHDDLKLLKDCIKNNVPNKYFDMFRNDSEKSKGYYNYINRPSKAPVDEFYKYVKKCIEKVDTPEAKQILNDIELENFLLKQNSRTNGSVPYQMQLDEMIKIIDNQAEYYPILKEKREQLLSILTFRIPYYFGPLNETSEHAWIKRLEGKENQRILPWNYQDIVDVDATAEGFIKRMRSYCTYFPDEEVLPKNSLIVSKYEVYNELNKIRVDDKLLEVDVKNDIYNELFMKNKTVTEKKLKNWLVNNQCCSKDAEIKGFQKENQFSTSLTPWIDFTNIFGKIDQSNFDLIENIIYDLTVFEDKKIMKRRLKKKYALPDDKVKQILKLKYKDWSRLSKKLLDGIVADNRFGSSVTVLDVLEMSRLNLMEIINDKDLGYAQMIEEATSCPEDGKFTYEEVERLAGSPALKRGIWQSLQIVEEITKVMKCRPKYIYIEFERSEEAKERTESKIKKLENVYKDLDEQTKKEYKSVLEELKGFDNTKKISSDSLFLYFTQLGKCMYSGKKLDIDSLDKYQIDHIVPQSLVKDDSFDNRVLVVPSENQRKLDDLVVPFDIRDKMYRFWKLLFDHELISPKKFYSLIKTEYTERDEERFINRQLVETRQITKNVTQIIEDHYSTTKVAAIRANLSHEFRVKNHIYKNRDINDYHHAHDAYIVALIGGFMRDRYPNMHDSKAVYSEYMKMFRKNKNDQKRWKDGFVINSMNYPYEVDGKLIWNPDLINEIKKCFYYKDCYCTTKLDQKSGQLFNLTVLSNDAHADKGVTKAVVPVNKNRSDVHKYGGFSGLQYTIVAIEGQKKKGKKTELVKKISGVPLHLKAASINEKINYIEEKEGLSDVRIIKDNIPVNQMIEMDGGEYLLTSPTEYVNARQLVLNEKQCALIADIYNAIYKQDYDNLDDILMIQLYIELTNKMKVLYPAYRGIAEKFESMNENYVVISKEEKANIIKQMLIVMHRGPQNGNIVYDDFKISDRIGRLKTKNHNLNNIVFISQSPTGIYTKKYKL

SEQ ID NO: 91 - protein, 1152 aa, Roseburia inulinivorans
MNAEHGKEGLLIMEENFQYRIGLDIGITSVGWAVLQNNSQDEPVRITDLGVRIFDVAENPKNGDALAAPRRDARTTRRRLRRRRHRLERIKFLLQENGLIEMDSFMERYYKGNLPDVYQLRYEGLDRKLKDEELAQVLIHIAKHRGFRSTRKAETKEKEGGAVLKATTENQKIMQEKGYRTVGEMLYLDEAFHTECLWNEKGYVLTPRNRPDDYKHTILRSMLVEEVHAIFAAQRAHGNQKATEGLEEAYVEIMTSQRSFDMGPGLQPDGKPSPYAMEGFGDRVGKCTFEKDEYRAPKATYTAELFVALQKINHTKLIDEFGTGRFFSEEERKTIIGLLLSSKELKYGTIRKKLNIDPSLKFNSLNYSAKKEGETEEERVLDTEKAKFASMFWTYEYSKCLKDRTEEMPVGEKADLFDRIGEILTAYKNDDSRSSRLKELGLSGEEIDGLLDLSPAKYQRVSLKAMRKMQPYLEDGLIYDKACEAAGYDFRALNDGNKKHLLKGEEINAIVNDITNPVVKRSVSQTIKVINAIIQKYGSPQAVNIELAREMSKNFQDRTNLEKEMKKRQQENERAKQQIIELGKQNPTGQDILKYRLWNDQGGYCLYSGKKIPLEELFDGGYDIDHILPYSITFDDSYRNKVLVTAQENRQKGNRTPYEYFGADEKRWEDYEASVRLLVRDYKKQQKLLKKNFTEEERKEFKERNLNDTKYITRVVYNMIRQNLELEPFNHPEKKKQVWAVNGAVTSYLRKRWGLMQKDRSTDRHHAMDAVVIACCTDGMIHKISRYMQGRELAYSRNFKFPDEETGEILNRDNFTREQWDEKFGVKVPLPWNSFRDELDIRLLNEDPKNFLLTHADVQRELDYPGWMYGEEESPIEEGRYINYIRPLFVSRMPNHKVTGSAHDATIRSARDYETRGVVITKVPLTDLKLNKDNEIEGYYDKDSDRLLYQALVRQLLLHGNDGKKAFAEDFHKPKADGTEGPVVRKVKIEKKQTSGVMVRGGTGIAANGEMVRIDVFRENGKYYFVPVYTADVVRKVLPNRAATHTKPYSEWRVMDDANFVFSLYSRDLIHVKSKKDIKTNLVNGGLLLQKEIFAYYTGADIATASIAGFANDSNFKFRGLGIQSLEIFEKCQVDILGNISVVRHENRQEFH

SEQ ID NO: 92 - protein, 686 aa, Coprococcus comes
MKKQDSPKNNMGYTAYNLNVLGYEEFAKRVELLFKDTDAVKRLNDSHMQMAEGFDLNALPGSPALRRGVSQAIKVLDDIVSVAGKAPDRIYLKVTRTASNSRKGKRTAKRSDKIKQALKALDADAAADLGAAKLLRELGMFDEKEINERIYLYFHQAGKCLYTGKPIDITRIASNDYYVDHVVPLAYRKDESLDNKVLVYAEASRYKSETLLVSPAVQRKMLPFWRMLRNAGLMSERKLNALIRTEISEGMLKSIIGRQFTENSWEAKLFTAAIAAKYPGTVVIPVKAGVIGAVRSRIGIPKSLKANQFYHAHDALLAAEVGRYMELAKPAFVHNRVKYEQYMRKIKLVNEENKKAPKSQLDFFAGGFFFDRVDKDTGEVYWNKDEEVERIYRACGWKNLRVTYAAFEDGGAFWKQTIYSPREKSKLIATKSDRPAEIYGGYSSQTFANFFVYEVMKKKVKQLRFGAVPAAIASKSDPDTYNAMLEMYARGLAKTAKEKFVRIVRARVLKNTMIELYGERFRIAGEKQVYPVRQMPLAIDEVYLLKGVETIAAAGNAGASAKIDFEKAAESLVGFWDLLLEKLPVNYPKLTVQLKLGLLKHPKDILAATSESEFPAIVYKIAEAEIQVMEQASGLRNMSDTKILGGNTFGGSLVFTFNKVLNDPKSKACFIDTTPAGLYEVKTKIW

SEQ ID NO: 93 - protein, 1105 aa, Actinomyces coleocanis
MDNKNYRIGIDVGLNSIGFCAVEVDQHDTPLGFLNLSVYRHDAGIDPNGKKTNTTRLAMSGVARRTRRLFRKRKRRLAALDRFIEAQGWTLPDHADYKDPYTPWLVRAELAQTPIRDENDLHEKLAIAVRHIARHRGWRSPWVPVRSLHVEQPPSDQYLALKERVEAKTLLQMPEGATPAEMVVALDLSVDVNLRPKNREKTDTRPENKKPGFLGGKLMQSDNANELRKIAKIQGLDDALLRELIELVFAADSPKGASGELVGYDVLPGQHGKRRAEKAHPAFQRYRIASIVSNLRIRHLGSGADERLDVETQKRVFEYLLNAKPTADITWSDVAEEIGVERNLLMGTATQTADGERASAKPPVDVTNVAFATCKIKPLKEWWLNADYEARCVMVSALSHAEKLTEGTAAEVEVAEFLQNLSDEDNEKLDSFSLPIGRAAYSVDSLERLTKRMIENGEDLFEARVNEFGVSEDWRPPAEPIGARVGNPAVDRVLKAVNRYLMAAEAEWGAPLSVNIEHVREGFISKRQAVEIDRENQKRYQRNQAVRSQIADHINATSGVRGSDVTRYLAIQRQNGECLYCGTAITFVNSEMDHIVPRAGLGSTNTRDNLVATCERCNKSKSNKPFAVWAAECGIPGVSVAEALKRVDFWIADGFASSKEHRELQKGVKDRLKRKVSDPEIDNRSMESVAWMARELAHRVQYYFDEKHTGTKVRVFRGSLTSAARKASGFESRVNFIGGNGKTRLDRRHHAMDAATVAMLRNSVAKTLVLRGNIRASERAIGAAETWKSFRGENVADRQIFESWSENMRVLVEKFNLALYNDEVSIFSSLRLQLGNGKAHDDTITKLQMHKVGDAWSLTEIDRASTPALWCALTRQPDFTWKDGLPANEDRTIIVNGTHYGPLDKVGIFGKAAASLLVRGGSVDIGSAIHHARIYRIAGKKPTYGMVRVFAPDLLRYRNEDLFNVELPPQSVSMRYAEPKVREAIREGKAEYLGWLVVGDELLLDLSSETSGQIAELQQDFPGTTHWTVAGFFSPSRLRLRPVYLAQEGLGEDVSEGSKSIIAGQGWRPAVNKVFGSAMPEVIRRDGLGRKRRFSYSGLPVSWQG

SEQ ID NO: 94 - protein, 1361 aa, Anaerococcus tetradius
MGNYYLGLDIGTNSVGWAVTDENYNIERFKKKNMWGIRLFDEAKTAESRRIHRQARRMRQRKIQRLNLLMELFDVEISKVDESFFIRKKESDLHYEDKSQDSRYALFNDKEFNDKDYHNKYPTIFHLIMDLIENDEKKDIRLLYLACHYLIKNRGHFIFEGQKFDVNSSLNNNINKLKSHLDQFYNICLDFDNDKLIEILVNQNLNISEKSKKIKELLRKTNLEVGIANLIAGGSIKLSNMFDDDELKNLDYNSLSFKNSNFDEGRELFEEVLEDRFELVEILKDIHDASVLETMLSSASISPDGGKYISSSMINSYNKHKRDLKLLKKIIKKYKKSEYDNIFRDENIKNNYLSYTRTGINKNKKVQAEDNTDSDGFYKYIVKILKDIKENDSDEDIKYILSEIDKKNFVPKQRTKENSVIPYQLREIELRKIIDNQSKYHKFLNEVDEKGISVKEKIISLLTFRIPYYIGPLNPSYNEEKNFTTSWVKRLAKGKVTPWNFEDMVDIDASREAFIENKLNKCSFLLDETVLPKDSLLYQEYMVLNELNNLKINGQSINTDLKKSIYEELFKKYKKVTRKRLISYIKEKENMSGDIVITGIDGDFKQGLKSYIAFKDIIGEKIDDDIYRKEVEKIIRDISLYGDDKSFIQKKIKNENKLDLSDDQISKIAKLKFKDWGRFSKKLLVGIKASDKNTGEIDNIIGFMRNYNYNIMQLMANVFTFKDEIEKLNSKYYTDEKINIDYLDDLYLSSPAKRMLWQSFQIVDEIKNIKNSDPKKIFIEMARSKEDKPTRKMSRKSRLEKLYTDSKKQFIKLFGPDEYDKLNNEIKNKSESDFRWDNLYLYYTQFGRCMYSLDPIDLEELSNKNLYDQDHIYPKSKIYDDSIENRVLVKKQLNLDKSNEYPIPDRVLNKDKNKLLAFWKMLNEKELIGDKKYARLIRKSPFTDEELGDFIARQLVETRQATKETANMLKRLCPDSKIVYVKAKNVSDFRRKFDILKCRSINDLHHAHDAYLNIVVGNVFDTKFTSNPLNFIKNNSKNRSYNLEKIYDYDVIRNEKIAWLAERKEENQDGSIATVLKNLSKNDIRVTRRTYIKCEDLFDENIVRKGNGKFPIKENNNKSDTNKYGGYSGIKNAYFVLLEDEKHNRILEAIPSFIYKKEKNGEKGSVINYLQNILGIKSAKILRDKIKIGSLLKIDKFPYNLAGKSGNGILISGGVQLILDKNTSKYIKKIENYKYKLDENKDYQINIFDKLSKEENIKLFDLFVDKFENSIYKNRVNIKLKEIKLARPKFEHLSIEEQIKTLTQMLILFGRENNAVNLEYIGLPKNTGKTKINKKINNKDIKIINQSITGLYETEEDLANI

SEQ ID NO: 95 - protein, 1377 aa, Lactobacillus brevis
MESNHDGEQVKYTLGLDIGTSSIGYAAIDKHQKPIRAKGKHVIGVRLFQEGQTAADRRAFRTTRRRLKRRKWRLNLLNRLFDPYLSEVDPNFLPRLRQSNLSPKDDNKHFNGSTLFPDKTDAAFYRQYPTMYHLRYALMTEKRKFDIREVYLAIHHIVKYRGNFLNSATVDSFKTSNIDFTSQFDRLNELYRQVILDEPFQINMDQVDEMTNKLLDNDALKLDTQKQVAKLLPVIYNDKPIDKQYTRIATEFSKAILGYKTKLDVILNLDTQNAKDWVIRLDDEDIDDKLPALVENLDESRQEIVTIIRDLYAQITLNAIVPKGKSLSESMVDKYNDHKDHLDLLMGLIHELGDDSAKGIKLREAYTQYVGKSDDKTLNQDDFYAAIKKNLDEDSKRSPKIQRLIEQASFMPKQRTSANGVIPHQLHQLELDRIIENQGRYYPFLKKPNPNTHKPNGGKYKLDELVAFRIPYYVGPLITKRDQEKTSGADFAWMIRKPGQEGEITPWNFDQKVDRMASANRFIRRMTTKDSYLVAEDVLPDASLIYEKFKALNELNMLKVNDSRLSPSQKQDLFNNLFKKQKTIRTKKLQTYIRTNWELPSVMISGLADPDKFNSSLSTYIDFRDIFGEKVDDPNRQADYEEIIEWSTVFEDRKIYQAKLNQLDWLTEPQRKALLTKRYTGWGRLSKKLLTGLKDQNGDSILDQLWKTNDNFMQIQSRDEFAKQIHDENAKQFHEANNVDDILDDAFTSPQNKKAIRQVDKVVQDVVKAVGYAPDKIAIEFTRSLENNPQRTVSRQRQLQAAYKNIPREIMKSGLMAELGSVADSKKVLSDKLYLYFTQMGKDMYEDKTINIDNLPNYDIDHILPQAFIKDDSIDNRVLISKEENARKSNRVPLKFFGAKRMGFWKDLLNNGLISNRKFQNLTTDPEKISKYSAKGFIHRQLVETSQVIRLVANILGNEYSQAGTTIIEVSAKMNRQLREDFHLIKNRNVNDYHHAMDAYLTAYVGDYLYLRYPKLRPYFVYGDFKKAEDQDLNIRNFNFLHDLKDNESLDKIVDSETGEIVWEKHGSVKQLKKVYHYKFMLVSQEVYTRQDALFNQTIYPASDADKRKLIPIKNSKPVDVYGGYSGNIDAYMAIVRVHGKKEDNYKVVGIPMRAVTKLKKAEKEGHDSYLNAVHEVLKPQFTKKKKNRKTGEITETVDEFDVLLGKVYYRQLIVDGNKKFMLGSSSYQYNAKQLVLSDKAMQVLSKNGKVKSQDENQNLIDVYDEILEKVDQYFELYDQRHYRESLHKGRGIFVNLPLSNQYDGSKLTSYGKYETIDAILNGLHANATMSNLRYLGISSPFGKMQASNGLTIDPDSIICYQSPTGLFERQIKLSDL

SEQ ID NO: 96 - protein, 1239 aa, Lactobacillus buchneri
MTEKRKFDIREVYLAIHHIVKYRGNFLNSATVDSFKTSNIDFTSQFDRLNELYRQVILEEPFQINMNQVDKMTNKLLDNDALKLDTQKQVAKLLPVIYNDKPVDKQYTRLATEFSKAILGYKTKLDVILNLDTQNAKDWAIRLDDEDIDDKLPALVENLDESRQEIVTIIRDLYAQITLNAIVPKGKSLSESMVDKYNDHKDHLDLLMGLIHELGDDSAKGIKLREAYTQYVGKSGDKTLNQDDFYAAIKKNLDEDSKRSPKIQRLIEQASFMPKQRTSANGVIPHQLHQLELDRIIENQGRYYPFLKEPNSNTHKPNGGKYKLDELVAFRIPYYVGPLITKQDQEKTSGADFAWMIRKPGQGGEITPWNFDQEVDRMASANTFIRRMTTKDSYLVAEDVLPDSSLIYEKFKVLNELNMLKVNDRRLSISQKQDLFNNLFKKQKTIRTKKLQTYIRTKWELPSVMISGLSDPDKFNSSLATYIDFRDVFGEKVDDPNRQADYEKIIEWSTVFEDRKIYQAKLNQLDWLTESQSKALLTKHYTGWGRLSKKLLTGLKDQNGDSILDQLWKTNDNFMQIQSRDEFAKQIHDENAKQFHEANNVDDILDDAFTSPQNKKAIRQVDKVVQDVVKAVGYAPDKIAIEFTRSPQDRPQRTFSRQRQLQSTYLNVAKALMKSNLNQELKSVIDSQQTLTDKLYLYFTQLGQDMYTGKEINFDELVNYQIDHILPQAFIKDDSLDNRVLVSAPINNAKSDNVPVKKFGAKMGYFWKQLAENHLISKRKLNNLTTDPDKIGKFTAQGFIHRQLVETSQVIRLVANILGNEYGHDGTTIIEVTAKMNHQMRKDFDLIKIRDVNDYHHAMDAYLTAYVGDYLYLRYPKLRSYFVYGDFKKLKDQSLKIRNFNFLHDLTNDEAGDKIVDQETGEIIWDKHESVKQLKKVYHYKFMLVSQEVYTRQDALFNQTIYPASDADKRKLIPIKNNKPVDVYGGYSGNVDAYMAIVRIHGKKEDKYKVVGVPMRAVADLKKAESKGRDNYLNAVHEVLKPQFTKKKKDRKTGEITEMMDDFDVLLGKVYYRQLIVDGNKKFMLGSSTYQYNAKQLVLSDKAMQVLSKDDKLKNQDENQNLIDVYDEILEKVDQYFELYDINKFRQKLHDGRKKFIELPVDNDFNGKKLISYGKRATIISILNGLHANATMSNLKYLGISSPFGMLQVPNGIILSPASRICYQSPTGLFERKVKLSDL

SEQ ID NO: 97 - protein, 1381 aa, Lactobacillus fermentum
MDYVKEYHIGLDIGTSSIGWAVTDSQFKLMRIKGKTAIGVRLFEEGKTAAERRTFRTTRRRLKRRKWRLHYLDKIFAPHLQEVDENFLRRLKQSNIHPEDPAKNQAFIGKLLFPDLLKKNERGYPTLIKMRDELPVEQRAHYPVTNIYKLREAMINEDRQFDLREVYLAVHHIVKYRGHFLNNASVDKFKVGRIDFDKSFNVLNEAYEELQNGEGSFTIEPSKVEKIGQLLLDTKMRKLDRQKAVAKLLEVKVADKEETKRNKQIATAMSKLVLGYKADFATVAMANGNEWKIDLSSETSEDEIEKFREELSDAQNDILTEITSLFSQIMLNAIVPNGMSISESMMDRYWTHERQLAEVKEYLATQPASARKEFDQVYNKYIGQVPKEKGFDLEKGLKKILSKKENWKEIDELLKAGDFLPKQRTSANGVIPHQMHQQELDRIIEKQAKYYPWLATENPATGERDRHQAKYELDQLVSFRIPYYVGPLVTPEVQKATSGAKFAWAKRKEDGEITPWNLWDKIDRAESAEAFIKRMTVKDTYLLNEDVLPANSLLYQKYNVLNELNNVRVNGRRLSVGIKQDIYTELFKKKKTVKAGDVASLVMAKTRGVNKPSVEGLSDPKKFNSNLATYLDLKSIMGDKVDDNRYQMDLENIIEWRSVFEDGEIFADKLTEVEWLTDEQRSALVKKRYKGWGRLSKKLLTGIVDENGQRIIDLMWNTDQNFMQIVNQPVFKEQIDQLNQKAITNDGMTLRERVESVLDDAYTSPQNKKAIWQVVRVVEDIVKAVGNAPKSISIEFARNEGNKGEITRSRRTQLQKLFEDQAHELVKDTSLTEELEKAPDLSDRYYFYFTQGGKDMYTGDPINFDEISTKYDIDHILPQSFVKDDSLDNRVLVSRAENNKKSDRVPAKLYAAKMKPYWNQLLKQGLITQRKFENLTMDVDQNIKYRSLGFVKRQLVETRQVIKLTANILGSMYQEAGTDIIETRAGLTKQLREEFDLPKVREVNDYHHAVDAYLTTFAGQYLNRRYPKLRSFFVYGEYMKFKHGSDLKLRNFNFFHELMEGDKSQGKVVDQQTGELITTRDEVAKSFDRLLNMKYMLVSKEVHDRSDQLYGATIVTAKESGKLTSPIEIKKNRPVDLYGAYTNGTSAFMTIIKFTGNKPKYKVIGVPTTSAVGLKRVGKPGSESYNQELHRIIKSNPKVKKDFEIVVPHVSYSQLIVDGDCKFTLASDTYQHPATQLVLSKESMEIIADDFKFVKENPATADEQLVRVFDEIVNQMNHYFTIFDQRSNRQKVTKARDKFVSLPTESEYEGAKKTQVGKTEVITNLLMGLHANAAQGDLKVLGLSTFGFFQSSGGLNLSEDAMIVYQSPTGLFERRICLKDI

SEQ ID NO: 98 - protein, 1306 aa, Sphingobacterium spiritivorum
MKHILGLDLGTNSIGWALIKQNFENKQGEILGMGSRIIPMGAELSKFEQGQAQTKNANRRIARGTRKLNKRYKQRRNKLIYILQGLGMLPDQIKLVNQFSDPNKLDKISILPISKNQQQLTAFDLLELRVKALTEKIELEELGKVIYKYNQLRGYSGGNSEPEKEENNEDESEENEKTNDSFVVFSKVLSLGLPEEITFKGKKLSKRKIAIETEDGIIEAETFLDSLKENDSLELHVNIRRAKSGDTITIKLPSKTSWRKKMENIEKQLADKSKELGREYFISELLFDILKENKWAKIRNNVILRSRYESEFDAVWSEQSKYYPILNHLETDRLQKILEFIFPGQKESQEKLRQTGLKEGLKYVIKNQVVFYQRELKDQSDLISNCRYEPTEKVVAKSHPVFQEYKIWEQINKLVINTKIENGVNRKGEIRYKYIDKPIPVALKEWLYEELQSKKEVSFNPILTKLKKEFKLRENVDFLNGMNAKDKLKGNETKVILQKALGELWNIFGLDDSERQVELWEILYNGKGNEYDLTSERTSNILAFIEKYSPDLENKNDVAIKISKIKFSRNYSNLSLKAIDNILPLVRAGKFFDQNFSEALSHKIVKLLNENVEDPFEKSAQEFLDKNQDVLSDGGIVNAIATILVYDKHTAKEYSGDELIKEFTQISRLKQGELRNPLAEQIINEALVIVRDIWRKYGFKPDEIRVELARELKNNAVERGKMYSANLKSQKHNAEIRNKLIELKQEISIANIEKYKLWVSQENLQEVYLKNYNDPSKSEIEKLKLWESQGHISPYTGQPISLSELFNRERYDVDHIIPQSRYFDDSLSNKVICEKSINNEKGNRTSMEYFEVGSVNYRIFTKDQFIDHANKYFSGKKRKNLLATSIPEDPIQRQIKDTQYISIRIREELNKIVGNENVKTTTGGITDYLRNHWGLTDKFKVLLKERYEAVLPKIAQLEYDNYKKETEKKFTEYKNADVEFNEPILDEEIFIEKFRSEFIRKKNNKLIIKGWSKRIDHRHHAMDALVIACTQPAHIKRLNDLNQVLKEWLDKNKEKFFPGFSGTKTELLDEVLNLEEEKRREIFNQLEKFRAIEMPWKGFPEEAEQKLKEVIVSHKPKDKLLLQYDIQGNKQIKLRGQLHEGTLYGLSNGKEIYRIPINKLAGKQFATEKTIEKIVNPFLKNVIEEHLKSFGKKEEAFSAEGILDLNKKLAERKDEQQNPKPHPPISTIKIYYKDPSKSKKKKTDDEDDISLQKLNRKKSFNDSLYVKTGDNYLFAVMEKEVFNKKLNKDKTERHYDLKLFLTLLIF

SEQ ID NO: 99 - protein, 1358 aa, Acidaminococcus sp.
MGKMYYLGLDIGTNSVGYAVTDPSYHLLKFKGEPMWGAHVFAAGNQSAERRSFRTSRRRLDRRQQRVKLVQEIFAPVISPIDPRFFIRLHESALWRDDVAETDKHIFFNDPTYTDKEYYSDYPTIHHLIVDLMESSEKHDPRLVYLAVAWLVAHRGHFLNEVDKDNIGDVLSFDAFYPEFLAFLSDNGVSPWVCESKALQATLLSRNSVNDKYKALKSLIFGSQKPEDNFDANISEDGLIQLLAGKKVKVNKLFPQESNDASFTLNDKEDAIEEILGTLTPDECEWIAHIRRLFDWAIMKHALKDGRTISESKVKLYEQHHHDLTQLKYFVKTYLAKEYDDIFRNVDSETTKNYVAYSYHVKEVKGTLPKNKATQEEFCKYVLGKVKNIECSEADKVDFDEMIQRLTDNSFMPKQVSGENRVIPYQLYYYELKTILNKAASYLPFLTQCGKDAISNQDKLLSIMTFRIPYFVGPLRKDNSEHAWLERKAGKIYPWNFNDKVDLDKSEEAFIRRMTNTCTYYPGEDVLPLDSLIYEKFMILNEINNIRIDGYPISVDVKQQVFGLFEKKRRVTVKDIQNLLLSLGALDKHGKLTGIDTTIHSNYNTYHHFKSLMERGVLTRDDVERIVERMTYSDDTKRVRLWLNNNYGTLTADDVKHISRLRKHDFGRLSKMFLTGLKGVHKETGERASILDFMWNTNDNLMQLLSECYTFSDEITKLQEAYYAKAQLSLNDFLDSMYISNAVKRPIYRTLAVVNDIRKACGTAPKRIFIEMARDGESKKKRSVTRREQIKNLYRSIRKDFQQEVDFLEKILENKSDGQLQSDALYLYFAQLGRDMYTGDPIKLEHIKDQSFYNIDHIYPQSMVKDDSLDNKVLVQSEINGEKSSRYPLDAAIRNKMKPLWDAYYNHGLISLKKYQRLTRSTPFTDDEKWDFINRQLVETRQSTKALAILLKRKFPDTEIVYSKAGLSSDFRHEFGLVKSRNINDLHHAKDAFLAIVTGNVYHERFNRRWFMVNQPYSVKTKTLFTHSIKNGNFVAWNGEEDLGRIVKMLKQNKNTIHFTRFSFDRKEGLFDIQPLKASTGLVPRKAGLDVVKYGGYDKSTAAYYLLVRFTLEDKKTQHKLMMIPVEGLYKARIDHDKEFLTDYAQTTISEILQKDKQKVINIMFPMGTRHIKLNSMISIDGFYLSIGGKSSKGKSVLCHAMVPLIVPHKIECYIKAMESFARKFKENNKLRIVEKFDKITVEDNLNLYELFLQKLQHNPYNKFFSTQFDVLTNGRSTFTKLSPEEQVQTLLNILSIFKTCRSSGCDLKSINGSAQAARIMISADLTGLSKKYSDIRLVEQSASGLFVSKSQNLLEYL

SEQ ID NO: 100 - protein, 653 aa, Oribacterium sinus
MELINSEEFTFKEELEKHTQVAMKQLSEFTYEDLEDSYFSVPVKRMIWQTLLVVREIEKVMGYAPKRIFVEMTRTEEEKGDKGRKESRGNQLLELYKSIKNTDSHNWKEEIAAADKDGKLRSKKLFLYYMQMGRDMYTGEEIDLGRLYDDNLYDIDHIYPRHYVKDDSIMNNLVLVNRRANQDIKKDLYPIPEQIKANPNVHMLWDALHKQKLITDEKYARLTSNTAFSEKQLGDFIARQLVETGQGTKGVADLLEQLFKDTVIVYAKASNVSDFRRDNGFLKSRLVNDFHHAQDAYLNIVVGNVYYTKFTKNPWNFICKDYEKDKEKNRYNLARMFDWNVVRGSETAWIVERKDEKGTISTVRKMMQKNTPLLTRMNFEQHGSIANATLYSAKKAKSENYLPLKTADEKMSDVKKYGGYTSMSIAYYFIVHHKEDKKENVTIEALPLYCKDKVEREENGLEKYCEEVLGYGEVNIIRRKLKIQSLLEFNGYQVHLSGKTGNQLILRNAISLCLSTKWITYIKKLEKAVNIQIVEEVVTPEENIKLYNLLADKHANTVYSKRPNAYGEKLLADREIFVTLEFGKQCEALLQILSLTKIGSTEANLLLIGESEHSGKILISKNLKASDRPAVINQSPCGLYEKKEWIFDKIVEK

SEQ ID NO: 101 - protein, 1436 aa, Capnocytophaga gingivalis
MKYIKYILGLDIGSNSIGWALIQLDLLQKTKRIIAAGSRIIPMDQKVLSDFGKGITISPTAQRTSYRNARHCRERHLLRRERLHRVLHILGFLPTHYDKQIDFSKRYGKFVDNTEPKIAYNEGKFLFMDSFQEMLSDFKSHQPDLFYTKKNGEESKIPYDWTIYYLRKKALSQKISKEELAWIILNFNQKRGYYQLREEEGNKENDFEIISSKIISVIKKDKDKKYNKYWYDIILENGLVYQAAFYNDFVYNWINQDREFIIERTSLKNGAEKVKLSYLPTFDEIDKMDKKEQDKYYKKIKIKTENSIGNKTVGCYIYDHILQNPNEKIKGKLVRTIERKYYKEELKAILEKQIALQPELFTDQLLADCIRELYSKNEAQQRNLAARDFVHLLVEDIIFYQRPLRRQKSTLANCSLESRSYIDKDSHTRKEAPLKVCPKSNPYYQEFRVLQWLQNLKIYEIDSDQEVTHQFIKTLEDKQQLFEFLMAQKEIDCEELLKYFLNQTYPNAKEKALKSELKKWKDTYRWNYVYDIGEKSSKKYPMNETRYELKRHLEKVANLPDDFLSSEVEYLLWHLIYSVKDKVAYEKGLKKFAQKHHLDKDSFVESFKKFNPYPSEYGSFSEKAIRKLLPLMRFGAHWDFNHIDKNTQKRIEDLITGVENEEIRTILREKAEKYQLEKETDFQDLPLWLAQYIVYNRHAEASSLEKWTSVNDLETYLNEFKQHSLRNPIVEQVVMETLRVVRDIWQQYGQGQASFFNEIHIELGRELKKTAKEREKLSKQNQKNEDINLSIKEKLKELEKYNTRAYSITHQEKYKLWLEQKHISPYTGQIISPENLFTDNYEIEHIIPQSRFFDDSLSNKVVCESIVNKAPYKDRQLGLEFIKNQGGRIVKELSKENKTIKIFTEEQYRTFIKEHYSNNPEKTKKLLLEEIPEKMVARQMNDTCYISKFISEILSKIVRSDEQDEGVHSKNVILCTGKITSILRQDWGLNDIWDNLILPRFERMNNLLQKEKFTIYSIEKQKKIPVVPINDQFKSFQKKRIDHRHHAMDAIIIACTTREHINYINNQHALEKEKDKKEKQEERDKLREKLCIKKYNNRSEGNYSWIFKKPWDTFTQEVRVALEDIVVSFKQNLRVINKATNYYERWVEENGKYIKKMVKQEGTNWAIRKPLHEETISGKIYLDREKITKNDILTATRKTVDSSFDDKRIKKITDTGIQKILLNYLKYKGSPEIAFSPEGLEELNKNLSIYNDGKPHKPIYKVRIYEKGSGRFALGEKGRKYKKYVQGASNLYFGIYQGAKRSFATIPLNEVIERQKQGLPSVPEYNEKGDLLLFSLSPNDLVYVPIEGEIIENIDFRNLSKEQKERIYNVNDFSSTCYFTPNRIAKAIFPKEVDLQRKGDKLSGSYDTKTASLEGIQIKEVCIKLKVDRLGNISKA

SEQ ID NO: 102 - protein, 1069 aa, Bacillus cereus
MNYDIGLRIGITSCGWSIINKDLERIEDLGVRVFEKAENPDGTASAAPRREARKSRRKHRRKKHRIERIKRLIVQHDLLSKKELDSLYLSPFNIDVWNLQVEALERKLDNREFARVLIHLVQRRGFQTIRKSVEIQEEGKLLENVSENERIMKVNGYKTVGEMFSKHEKFTHHKRNKDGSYTSVVTRSLLLKEIKTIFNSQRILGNVFSTQKLESDYLYIWGSQRPTLTYEQLMSMVGNCIYEKKEKRAPKTSWAFQYFSLLQKINKLKVSDDNTLRKLSKEERDIVIELAFKKKNVSFVDIRKALKLNDNTKFNHLTYSHVVETKKVEKATFIELKGYHLIKKQLKDRNVELTQELQPKDYDAIAAASTFFKNDIEFRDYLRNQYLDSNGKRKSNIANKVFEDKVIAAVFELNFSKVCHLSFKSLYKLIPHLEKGLDYKEAILCAGYNFRDENKRDKKLFLPVIQQETNPVVHRALTQARKVINAIIREYGSPNTIRFVVANDLAKTYKQRKELESTLKKNRAENEKIKTKLLSMGIINPTGMDIVKYKLWYEQSGICLYTGRQMELSSLFKPGYSIVNHIIPYNRSFDDTYHNRVLTLTETKYEKGNKIPFEYFGAEETCWNEYEKRVSTSKKIHDKKREKLLIRNFDIEYENEMISNNVFDTHYIGSYFEKYIDEHLQFKKSTKKQKVFSIHGNMVAHLHSRWGFNKNSREIYLNHAVDAAIVAVLTDQLIRNIADYYRRDNILEQKGSLKFPEPWKSFSIELEARISPQVRDLIKKLNLDSYLDVDILHIKPVFISKKPRRKVNGEAHKSTIRSLIGINEIGKTVTCIKTRLEDIPFDENGDFPMYGKDTDKYTYTAIKERYLEFNKDKEKAFSTPLYKLKRNGEPGNQIKSVKIIDTRNIVNKVNQGKGIAYNSNIIRVDVFSRDQKYYVVPIYLRDFIKGSLPNKIITAAKGFMQWPETDNSYTFLFSIFPNDLIKVVPKEGKFIKAKNENKENINLTEILGYFKGLDSSTGAFTLESHDGSLLARGIGTKNLLLIEKYQVDVLGRYNKVGNEERQDIKIQQN

SEQ ID NO: 103 - protein, 1391 aa, Lactobacillus jensenii
MKEIKDYIIGLDIGTNSCGYVVTDKQNNILKLKGKTAIGARLFKEGEAAADRRAFRTTRRRLARRRWRLSLLEEIFDEEMNKVDPSFFRRLKESDYSPKDRRKQFNSIVFESSEADKAFYEKYPTIYHLRNALMHDNQKHDLREIFLAVHHIVKYRGNFLREDSVKAFKAAKFTLQGEDGIGPVDKLNDLLKEIYIEAAPELATDNLSKIEDIIKDKKLYKQDKLKQIANLLPKAVDSKDKAKLNKDIAKQVANALMGYMFRLDTLFSFTDVDVKDYKLKFSDANIDESLDALTSLLTDAQIEFVLELQSIYNTIVLNEIVPDGMSLSESMVKKYDDHKKDLKLYKEYIDSLSDQKKAKQLEAAYALYVNYRKADLLAAKKLFEKKKIGDKKFVDVISNFEVFGKFVSDNLDDSELANKIKARLDLGEFLPKQRTNQNGVIPYQLHQVELTQILEKQGKYYPFLITPNPVESHRNNAPYEISELVSFRVPYYVGPLIDNQSIKDKQNKNKFAWMVRQKQGQITPWNFEEMVDTTESANQFIKRMTRKDTYLLAEDVLPKSSLIYQKFMILDELNRIKIDGKKLTSKLKHDIFEKLFKKQKSINLDNLKNYLLAEGNIPGLIEGLSDGINFNNSFSTYIDYRNIFGDEIDNPNKQADFEKMIEWSTVFEDRKIFKRKLKEITWLTPEQIKQVSSKRYSGWGRLSKKLLTQITDENGVNILQRLWNEPETLTEVLANPVIKRKISEANSLFVQINKVENILDDAYTSPQNKKAIRQVIRVVDDIIAAAHGKKPSQIAIEFARSSQNKAKVPDTRKKQLDKIYNKISSEILDSSIKNELKNLKSNKYLSKDKLFLYFKQMGRDAYTGDKLSLDQLQNYDIDHIFPRSFIKDDSLDNRVLTQKPINAKKSDYGIPALEFGNKYVPDLGITVKEMWKLWQENGLISKSKLINLCTNPKKIGSKRASGFINRQLVETSQVIKLVAIILQAEFPDTEIIEVKALQNTTLRESFHLYKNRSVNDYHHAIDAYLTTIVGNYLYQVYPKLRPYFVYGQFKKFNQEKNIDILKRLKNFNFLRQLIFNTDDNIYISGTKEIVFNKKDIIHKLETAYGYKYMNISRECYQETSSLFNQTLYAHNSSVKNSLIPKKKGLPTEIYGGYSGNKDSFFVLVKIVKKRTNLYRIVGIPTRELAKLNSSNNYNQALNKIVESKLCLKETESFKILIKRLLYGTLIVDNGQKFRIGSFKEKHNVQQLVLQLKSMKYIKFYIDGGQNYFTDVERKKLEKQDRDKCLLYVFDDIMNVVNKRFTLFDMSKYEKDGDSLREKFNCLDFNDKVSILSDLLKAFHANSDRTSITKLKITNLGRHQAGKNGITLTTNAQIIYQSPTGLFERRIKIKDL

SEQ ID NO: 104 - protein, 1114 aa, Eubacterium rectale
MNYTEKEKLFMKYILALDIGIASVGWAILDKESETVIEAGSNIFPEASAADNQLRRDMRGAKRNNRRLKTRINDFIKLWENNNLSIPQFKSTEIVGLKVRAITEEITLDELYLILYSYLKHRGISYLEDALDDTVSGSSAYANGLKLNAKELETHYPCEIQQERLNTIGKYRGQSQIINENGEVLDLSNVFTIGAYRKEIQRVFEIQKKYHPELTDEFCDGYMLIFNRKRKYYEGPGNEKSRTDYGRFTTKLDANGNYITEDNIFEKLIGKCSVYPDELRAAAASYTAQEYNVLNDLNNLTINGRKLEENEKHEIVERIKSSNTINMRKIISDCMGENIDDFAGARIDKSGKEIFHKFEVYNKMRKALLEIGIDISNYSREELDEIGYIMTINTDKEAMMEAFQKSWIDLSDDVKQCLINMRKTNGALFNKWQSFSLKIMNELIPEMYAQPKEQMTLLTEMGVTKGTQEEFAGLKYIPVDVVSEDIFNPVVRRSVRISFKILNAVLKKYKALDTIVIEMPRDRNSEEQKKRINDSQKLNEKEMEYIEKKLAVTYGIKLSPSDFSSQKQLSLKLKLWNEQDGICLYSGKTIDPNDIINNPQLFEIDHIIPRSISFDDARSNKVLVYRSENQKKGNQTPYYYLTHSHSEWSFEQYKATVMNLSKKKEYAISRKKIQNLLYSEDITKMDVLKGFINRNINDTSYASRLVLNTIQNFFMANEADTKVKVIKGSYTHQMRCNLKLDKNRDESYSHHAVDAMLIGYSELGYEAYHKLQGEFIDFETGEILRKDMWDENMSDEVYADYLYGKKWANIRNEVVKAEKNVKYWHYVMRKSNRGLCNQTIRGTREYDGKQYKINKLDIRTKEGIKVFAKLAFSKKDSDRERLLVYLNDRRTFDDLCKIYEDYSDAANPFVQYEKETGDIIRKYSKKHNGPRIDKLKYKDGEVGACIDISHKYGFEKGSKKVILESLVPYRMDVYYKEENHSYYLVGVKQSDIKFEKGRNVIDEEAYARILVNEKMIQPGQSRADLENLGFKFKLSFYKNDIIEYEKDGKIYTERLVSRTMPKQRNYIETKPIDKAKFEKQNLVGLGKTKFIKKYRYDILGNKYSCSEEKFTSFC

SEQ ID NO: 105 - protein, 1362 aa, Lactobacillus paracasei
MTKLGKPYGIGVDIGSNSIGFAAVDENSHLIRLKGKTVIGARLFEEGKAAAKRRAGRTTRRRLSRNRWRLSFLRDFFESHITPTDPNFFMRQKYSEISPKDKARYKYEKRLFNDRTDAEFYQQYSTMYHLRNRLMTDPSRADVREIYFAIHHILKSRGHFLTPGDAKDFNTNDVALDEIFPALQDAYAQVYPDLGITFDEDKANEFKTILLNEIATSIDTQRALVKLLLAEEDDKDILKQQKQVLTEFAKAVVGLKTKLNLALGTEVDSSEATAWNFSLGQLDDKWAGIESAMTDEGTEILDQIRDLYRARLLNGIVPTGKTLSQAKVDDYTQHHEDLQLFKAYLKQLEDDGTAKAIRQLYDRYIDGDDAAPFLRENFVKALTKDVTAHPNTKSPELLERLAQPDFMLKQRNKANGAIPVQMQQRELDQIIKNQAVYYDWLAAPNPVEKHRKSMPYQLDELLNFRIPYYVGPLVTAKEQKAAQGGVFAWMVRKDPEGNITPYNFDEKVDREASANTFIQRMKTTDTYLIGEDVLPKQSLLYQRYEVLNELNNVRVNNEKLSIEQKQQVIRELFERHNSVTIKQFAENLRAHGDYAHIPEIRGLADEKRFLSSLSTYRQLKSLLPEAIDDPAKQADIENIIAWSTVFEDAAIFKTKLKEISWLGSEAITKLSNIRYRGWGQFSRKFLNGLTLGNGHTIIQELLLSTNNLMQILTDETLQKKMTELNADKLKTANINDAIDNAYTSPSNKKALRQVLRVVDDIKRAADGQDPSWLYVETADGGGTPGKRTRARQHQLQEIYANAAHELIDTAVRGELEDKISDKADFNDRLVLYFMQGGRDIYTGAPLNIDQLSSYDIDHILPQSLIKDNSLDNRVLVHAIINREKNATFASTIYAQKMNATWRQWHEAGLISGRKLRNLQMRPDQIDKYASGFVARQLVETRQIIKLTEQIVAAQYPDTKIIAVKAGLSHQLREELEFPKNRDVNHYHHAFDAFLAARIGTYLLKRFPNLQAFFTYGKFTKADVKKLRGFNFIRDITHAEDKIVAKDTGEVVWDKQRDVDELDRIYNFKRMLITHEVRFETADLFKQTVYGARDSKEAGGSKQLIPKKKGYPVDIYGGYFRENTAYLAVVKVTKKTETIFKVVKIATSQVAALNKARSRSTAEELSVLTELLKPKFSKVGKNGKITDTPFEVVLPRVPREQLFYNAKYGFFMVNSDTMFHNFQEIWVSRSDQKILQQIRKAKIDYPNVDQDLDNLFHNLADQIVKYFDLYSIAGFKEKISQSQNTFNDLAVDDTDQSVGKITVINELLKGAQANGMTGSLKVLKISTPFGFTQDKSGVLTKDSSIIYQSPTGLFERSVRLTDL

SEQ ID NO: 106 - protein, 1056 aa, Actinobacillus minor
MKALNYILGLDLGIASVGWAVVEIDQNELPIRLIDLGVRTFERAEVPKTGDSLALARRLARSSRRLVRRRAVRLLKAKRLLKQEGILQADDFHSSHLKPLPNNPWELRVKGLNHLLDRKEWAAVLLHLLKHRGYLSQRKNESKTDNKELGALLKGVSENRQLLQAQAFSTPAEIAIKKFQQEEGHIRNQRGAYSHTFDRNDLLAELRLLFQKQREFNNPYTSQSLEQAIAELLMWQKPALSGEAILKMLGKCTFEPSEYKAPKNSYSAEYFVWLTKLNNLRILENGADRGLTAEERQLLINQPFEKAKFTYAQARKLLELSDLAIFKGVRYGKDNAESATLMEMKAWHAIRKALESNGLKTEWNGLKTKPELLDKIGTAFSIYKTDEDISQYLNGELSPAVLNALLENLSFDKFIRLSLQSLAKILPLMEQGLRYDEACKQVYGDHYGKKEQLELRFLPKIPVEDIRNPVVLRTLSQARKVINGVVRLYGSPARIHIETGREVGKSFSERRDISKRQEENRNERQRAVEKFKEFFPHFVGEPKAKDILKMRLYEQQHGKCLYSGKELDLNRLLEKGYVEIDHALPFSRTWDDSFNNKVLVLASENQNKGNQTPYEWLNGKENAERWKLFQALVNGSRFPYSKKQRILTKYLDEDGFRERNLNDTRYVARFLCNFIEDNMQLVGQGKKRVFASNGQITALLRRSWGIQKVREDNDRHHAVDAVVVACSTRALQKKITDYVRYKEMNVFTGEKIDQETGEIIKFHFPEPWKFFRQEVEIRVFSETPAEDVVIALPDRPQANHEFIQPLFVSRAPTRKMTGQGHMETIKSAKRLAEGLSVSRVPLTQLKLKDLENMVNREREKALYEALKVRLEKFNNDPAKAFADPFYKKGGQQVKAVRVEQVQKSGVLVRQENGVADNASMVRVDVFIKGGKYFLVPIYTWQVAKGILPNRAATQGKEEEYWDIMDETAIFQFSLYQNDLIKLVTKKKTIFGYFNGLNRATSNINIKEHDLDKSKGKDGIYLEVGVKLALSLEKYQVDELGKNIQPCRSMKKRPPVR

SEQ ID NO: 107 - protein, 1081 aa, Neisseria flavescens
MTAFKPNPINYILGLDIGIASVGWAMVEIDEEENPIRLIDLGVRVFERAEVPKTGDSLAAARRLARSVRRLTRRRAHRLLRARRLLKREGVLQAADFDENGLIKSLPNTPWQLRAAALDRKLTPLEWSAVLLHLIKHRGYLSQRKNEGETADKELGALLKGVADNAHALQTGDFRTPAELAVNKFEKESGHIRNQRGDYSHTFSRKDLQAELVLLFEKQKEFGNPHISDGLKEGIETLLMAQRPALSGDAVQKMLGYCTFEPTEPKAAKNTYTAERFIWLTKLNNLRILEQGSERPLTDTERATLIDMPYKNKLTYAKARELLGLDDTAFFKGLRYGKDNAESATLMEMKAYHAIRRALEKEGLKDKKSPLSLSPELQDEIGTAFSLFKTDEDITGRLKGCLQPEILDALLKHINFDKFVQISLKALRRIVPLMEQGKRYDEACAETYGDHYGEKNSEEMLYLPPIPADEIRNPVVLRALSQARKVINGVVRRYGSPARIHIETAREVGKSFKDRKEIEKRQEENRKDREKAAAKFREYFPNFVGEPKSKDILKLRLYEQQHGKCLYSGKAIDIRRLNGKGYVEIDHALPFSRTWDDSFNNKVLVLGSENQNKGNRTPYEYLNGKDNSREWLEFKARVETSRFPHSKKQRVLLQKFDEKGFKERNLNDTRYVNRFLCQFVADHMQLTGKGKRRVFASNGQITNLLRGFWGLHKVRAENDRHHALDAVVVACSTVAMQQKITCFVRYKEMNAFDGKTVDKETGEVLHQKTHFPQPWEFFAQEVMIRVFGKPDGKPEFEEADTPEKLRALLAEKLSSRPEAVHEYVTPLFVSRAPNRKMSGAHKDTLRSAKRFVKHNEKISVKRVWLTEIKLADLENMVNYKNGREIELYEALKARLGAYGGNAKQAFDPKDNPFYKKGGQLVKAVRVEKTQESGVLLNKKNAYTIADNGDMVRVDVFCKVDKKGKNQYFIVPIYAWQVAENILPDIDCKGYRIDDSYTFCFSLHKYDLIAFQKDEKSKVEFAYYINCDSSNGRFYLAWHDKGSKEQQFRISTQNLVLMQKYQIDELGKEIRPCRLKKRPPVR

SEQ ID NO: 108 - protein, 1392 aa, Gemella haemolysans
MANKTWYLGLDIGSASVGWAATDTGYKIIRKNKKRLWGVRLFEEAKTAEDRRGYRSSRRRLARRKWRLNLLEELFTSEVKKVDENFFLRLKESQYHYEDKTHKVPYAIFNDKDYTDKDYYKDYPTIYHLRSKLMTEENPDIRKVFLAIHHIIKNRGHFLLQGQSFKDGNLNNLIKELLELDILHVGFEVTEEVVDKIADISLEKKTSKDKLNDIKELYPKEKQLLEVFRLIFGGKTSLDKLFAIDEYKELDAAIKSVSFKEKIYEEVRHDYEQVLSNYIELLDLAKLVYDSIILSDIKKEGKTLSESKVELFEKHRDDLLKLKNLVKNDSKLSEDKKVELYALIFKEDKDKGTNYVNYIRKSEEGKGCNYEDFKKFLVKELAKLEESSVKTEIIKDLELEQFLPLQRTKDNSVVPYQIHKEELVKILDNAARYHSFLNEKDESGYNVREKVIQLLEFRIPYYVGPLNSSKKAKEGGFAWSVRNTGYENTPVTPWNYSKVIDESASAEKFITNLTNKCTYLKGEDVLPKSSLLYSEFALLNELNALKYDGNRISLEARNTIIEKLFKQQGKKVTKTSIKNLLKAEGYIDGKGEITGIDITVKNDLKSYRDFKKILGNKFNSEHVENIILWITLYGESRKLIKAKIESVYGEVYSKDEITKMSRLVYKDWGRFSRKLLTELVSKKLYNEETGECLNIIGAMRQNNILFMELLADRFDYSKQIVEFNKELQEDVTEIAPEILDDLYVSPAVKRSIWQTVRIVEELKKIIGCAPAKIFVETTRSNQEKKKPTDSRKKQLELAYKAVKKDVKELEKEIGTINFDVLNDRLSSVEPSKLKAKKLYLYYTQLGRCMYSEEPINISELFDNNKYDIDHIYPQSKIKDDSFTNTVLVKRESNAAKTDRYPLGSDIQTPSNRRFWKFLKEKGLISDEKYNRLVRTEEFSDEELSGFIARQLVETSQSVKAVASILGELNPETSICYSKAENVSSFRQNFGKIKKGDRDSKNNDQLIKVREINDYHHAKDAYLNVVVGNVYDTKFTRNVFNFIKDKKDGRKYSLNKVFYENVSDSKTVAWEMDKTIHQVEKVMNNNNIMVTRRTSEQKGGLFDATVYKAKVAAKAKDGVYYPLKTSNSVVKDVAKYGGYTSIGIAYYSIFEYTIVNKKGEEKITRIIPIPIYISQNIKDSTALIEFGKSQIFCRAYEKIKDFKLLYRKLCIGSKININNYQYYIGGKSDERFYYDSAIQVTLDKKSEKYLKILSKYQNWKKENKDGELWENITKENNIELYNKLVEKMNSEIFTKKKSNKYNELNSEEIRNNFIKISVEEQAKVLLEILNLLTNKKSIFDLKSIDIKAARGKISFNLTSLIQFSIIEQSITGFYEKEITIIGDKGNDMENNNS

SEQ ID NO: 109 - protein, 702 aa, Helicobacter pullorum
MRKILKIDERIQFKEVDYTAKNPENKKFVEFKNLKKFCEILGAIVGDRALADSIARDMTLIKDEEELAQKLRGYGKFSQEQITQLSALHFSHHISLSLKALSEILPFMREGMRYDEACQEAKLQAKHNDKKSKFLPPFCESIYADELTNPVVHRAIAEYRKILNALIAKYGSVHKIHIELTRDVGKNFQEREKYKKEIESNYKARVQAMQECEKLGLTLSEGNILKLRLFREQNEICVYSGRKITLANLKEQGALEIDHILPYSRSSDDSYMNKVLVFTNENQNKGNKTPYEAFGGDSQKWGEIESLALRSGYPKKKAKRILDKGFGDREAGFKSRNIVDSGYIARLIANYTKEYLKFLPLDSHENTALIAGEKDSKIHVEAVKGMLTATMRHFWGLGSKNRYEHTHHAVDAIIIAYINAAMIQRFSQFRQNQESLKARFYAKELAKEEFKTQRAFFEPFSGFREQVLAKVGQIFVSRPPRKRARGALHEETFYSIDDKKLSETYGGKKGVQRALSLGKIRQIGTKIVANGPMVRVDIFKHTQSGRFYAVPIYTMDFALGILPNKAVVSGKDKDRIIKDWLEMDSCYEFCFSLFKDDVIEVQKRDMEKPELAYFVSLDASDGRIKVRHHCNDITKINENQKKLFSEAIEKEVVGRGSIQNLKVFKKYKVSPLGEIKEAKYEPRQPIALKTSPKKHRKQNNAQ

SEQ ID NO: 110 - protein, 1371 aa, Streptococcus dysgalactiae
MDKKYSIGLDIGTNSVGWAVITDDYKVPSKKFKVLGNTDRHSIKKNLIGALLFDSGETAEATRLKRTARRRYTRRKNRIRYLQEIFSSEMSKVDDSFFHRLEESFLVEEDKKHERHPIFGNIVDEVAYHEKYPTIYHLRKKLADSTDKADLRLIYLALAHMIKFRGHFLIEGDLNPDNSDMDKLFIQLVQTYNQLFEENPINASRVDAKAILSARLSKSRRLENLIAQLPGEKRNGLFGNLIALSLGLTPNFKSNFDLAEDAKLQLSKDTYDDDLDNLLAQIGDQYADLFLAAKNLSDAILLSDILRVNSEITKAPLSASMIKRYDEHHQDLTLLKALVRQQLPEKYKEIFFDQSKNGYAGYIDGGASQEEFYKFIKPILEKMDGTEELLAKLNREDLLRKQRTFDNGSIPHQIHLGELHAILRRQEDFYPFLKDNREKIEKILTFRIPYYVGPLARGNSRFAWMTRKSEETITPWNFEEVVDKGASAQSFIERMTNFDKNLPNEKVLPKHSLLYEYFTVYNELTKVKYVTEGMRKPEFLSGKQKEAIVDLLFKTNRKVTVKQLKEDYFKKIECFDSVEISGVEDRFNASLGTYHDLLKIIKDKDFLDNEENEDILEDIVLTLTLFEDKEMIEERLKKYANLFDDKVMKQLKRRHYTGWGRLSRKLINGIRDKQSGKTILDFLKSDGFANRNFMQLINDDSLTFKEAIQKAQVSGQGHSLHEQIANLAGSPAIKKGILQSVKVVDELVKVMGHKPENIVIEMARENQTTQKGQKNSRERMKRIEEGIKELGSQILKEHPVENTQLQNEKLYLYYLQNGRDMYVDQELDINRLSDYDVDHIVPQSFIKDDSIDNKILTRSDKNRGKSDNVPSEEVVKKMKNYWRQLLNAKLITQRKFDNLTKAERGGLSELDKAGFIKRQLVETRQITKHVAQILDSRMNTKYDENDKLIREVKVITLKSKLVSDFRKDFQFYKVREINNYHHAHDAYLNAVVGTALIKKYTKLESEFVYGDYKVYDVRKMIAKSEQEIGKATAKRFFYSNIMNFFKTEITLANGEIRKRPLIETNEETGEIVWDKGRDFATVRKVLSMPQVNIVKKTEVQTGALTNESIYARGSFDKLISRKHRFESSKYGGFGSPTVTYSVLVVAKSKVQDGKVKKIKTGKELIGMTLLDKLVFEKNPLKFIEDKGYGNVQIDKCIKLPKYSLFEFENGTRRMLASVMANNNSRGDLQKANEMFLPAKLVTLLYHAHKIESSKELEHEAYILDHYNDLYQLLSYIERFASLYVDVEKNISKVKELFSNIESYSISEICSSVINLLTLTASGAPADFKFLGTTIPRKRYGSPQSILSSTLIHQSITGLYETRIDLSQLGGD

SEQ ID NO: 111 - protein, 1007 aa, Helicobacter canadensis
MKVLGFDIGINSIGWAFVENNELKDCGVRLFTKAENPKTKESLALPRRNARSSRVRLRRRRSRLLSLKHIISKEFGLHYEDYIALDGNLPKAYTGKIESIYKLRYEALSQAISKEDLARVILHIAKHRGYMNKNQKTSQDSEKGAILSAIKENSNKIKHYQTAGEYFYKELFENLRDGTKEFKNIRNKAMKNEKTGNMESTYYNTILASDLEKELKLILEKQQAYHNYSDTFIKEVLEIAFYQRPLKDFSHLVGSCTFYENEKRACKNSYSAWEFIALGKIINTLESIKKDTGEIFSNEIITQILKEVLDKGSLSYTKLRKMINLDEKVKFKGLKYDKEGVEKTNLIEFKKLKEFKKALGEHNLERKTLDEIATHITLTKDENQLKKQLEQYALSQNQIDALAELDFNDHINLSFKALYEILPLMEKGKRYDEACNELGLKAKTSNQKSEFLPAFCDSIFAQELTNPIVNRAISEYRKVLNRLLKKYGKMHKIHIELARDAGLSKEARNKIEKEQKENKDINDKAEKTCKEFGLKPNAKNILKIKLWREQGEICAYSGKKITIDDLKEDKALEVDHIYPYSRSYDDSYNNKVLVFIKENQLKLNQTPYEAFGSNQEKWSKIQVLAQKLPYKKKNRILDENFKNKDQIEFISRNLNDTRYATSLIAKYTKEYLEFLPLSDDEDISLKSGEKGSKTHVQTMNGMLTSVLRHAWGFSQKDRNNHLHHALDAIIIAYSTNSIIKAFSDFKKNQEILKAKLYAKKLTSEEYKNQSKFTGFEKYRSKILEKLDSIFVSKPPNKNTKGALHEQTFYSYQDILEEYKTQEGLKRALECGKVRKIGTKYVVNDRMVRLDIFKKDNKFYGIPIYTMDFALGVLPNKVVTIGTDKDKIKKEWKTIDETYEFCFSLYKGDLVLIQKKEMQESEFAYYNGFDISSASISLEKHDNKFENLTENQKLLFPKAKEGDVEVRGIGIQGLKVFKKYMVTPLGEIQETRTEARQNIQPRKKHGLR

SEQ ID NO: 112 - protein, 1397 aa, gamma proteobacterium
MTKNYISPIAIDLGAKFTGVALYQYLEGADCTQEVAKGLLVDDRGNVTWSQEGRRGKRHQVRGYKRRKMAKRLLWLILDSEYGIKREEVTEPLLKFINGLLNRRGYTYISEEVDEESMNVSPLPFSEMMPDYFNSSAPLLEQLAKLLSDKNKLVRFRAEGKIPSNKNEFKKLLDTALDGKYKDEKKELSEAWGNILIASENVLKSTVDGHKSRSEYLANIKEDIKSNEELEKQISSKEIDGFYNLVGHLSNFQLRLLRKYFNDPNMSGVSYWDEKRLEKYFYQWVQGWHTKGGTDEAEKKNIILKTKGAPLLKTLKSLSADLTIPPYEDQNNRRPPKCQSVLLSDEKLTMHYPKWKEWVGQLVKQNDNAYLNENVTLANALHRIVERSRSIDPYQLRLLISITDAEKRNDLAGYKRLKLSLGSEVDEFLLLVKNIVDETKEAREGLWFETENKLFFKCGKTPPRKEKLKSTLLSAVLGKNLSDDEQSSFIEEFWKSGTPKIERRNVRGWCRLASQVQKTYGVYLKEYGLQQLHKLEAGKKLDDKPLALLYKNSGLIASKIGEALNIEPDEVSRFASPHSLAQIFNIIEGDVAGFNKTCRACTYENIWRMQEEKVESLLTNQLLSEIHGERKVPLKSAMCTRLSADSTRPFDGQMASIIEHIARKIAQHKIAQINDVPKEFSIDIPIIIESNQFSFTAELEEIKRGRGSAKAKKAKELGEKSKAGWVSKTERIKTSSEGICPYTGAPLGGSGEIDHIIPRSLTGRTKKTVFNSEANLIYCSSKGNHDKGNRVYVIEQLNDKYLKKQFSTSDVNLIKKKIKTTIQRFTEGGEKLRSFSELSREDQKAFRHALFVPELKSEVTSLLAVKNITRVNGTQAWLAKKIASLLAEHLDKQGRDYTLSAHQIDPWSVSKQRKMLASAEPIWAKKDPQPAASHVVDAVCTFLEALEQPHTASRLKTISSTSFEKTGWRSALIPDLIKVDALDRRPKYRRYNIGSTSLFKDGIYAERFLPILIDENGLMAGYDIDNSLKAKGADVVFESLSPFLLFKGEEVGAQSLSDWQERIDGRYLYMSIDKVKAFDYLQEKVGEKDIAAELLNSIHFTQRKTELRAKFSDDSGKKMKTLDAIRKSLKLTVTVNEIGKRKEKCGFSGTIGIPAKSAWENLLDEPLLETYWGTKMPPQEIWEKVYRKHFPRNIPNQAHRKVRKDFSLPVVDSVSGGFRVKRKTPNGYNYQLLAIDGYSAVGFKKEGDNVDFKSPALVPQIAESKSVTPISSELVHLDKNEIVYFDEWRKIDISDSDLKQFVSSLELAPGSQNRFYIRFTVDEDQFERHFKSALRVNGIQDLDTVNKTFDWNREIPSLLIPPRSNLFLLETGQKITFEYIANGANAEVKKAYSLRRA

SEQ ID NO: 113 - protein, 1082 aa, Neisseria meningitidis
MAAFKPNPINYILGLDIGIASVGWAMVEIDEEENPIRLIDLGVRVFERAEVPKTGDSLAMVRRLARSVRRLTRRRAHRLLRARRLLKREGVLQAADFDENGLIKSLPNTPWQLRAAALDRKLTPLEWSAVLLHLIKHRGYLSQRKNEGETADKELGALLKGVADNAHALQTGDFRTPAELALNKFEKESGHIRNQRGDYSHTFSRKDLQAELILLFEKQKEFGNPHISGGLKEGIETLLMTQRPALSGDAVQKMLGHCTFEPAEPKAAKNTYTAERFIWLTKLNNLRILEQGSERPLTDTERATLMDEPYRKSKLTYAQARKLLGLEDTAFFKGLRYGKDNAEASTLMEMKAYHAISRALEKEGLKDKKSPLNLSPELQDEIGTAFSLFKTDEDITGRLKDRIQPEILEALLKHISFDKFVQISLKALRRIVPLMEQGKRYDEACAEIYGDHYGKKNTEEKIYLPPIPADEIRNPVVLRALSQARKVINGVVRRYGSPARIHIETAREVGKSFKDRKEIEKRQEENRKDREKAAAKFREYFPNFVGEPKSKDILKLRLYEQQHGKCLYSGKEINLGRLNEKGYVEIDHALPFSRTWDDSFNNKVLVLGSENQNKGNQTPYEYFNGKDNSREWQEFKARVETSRFPRSKKQRILLQKFDEDGFKERNLNDTRYVNRFLCQFVADRMRLTGKGKKRVFASNGQITNLLRGFWGLRKVRAENDRHHALDAVVVACSTVAMQQKITRFVRYKEMNAFDGKTIDKETGEVLHQKTHFPQPWEFFAQEVMIRVFGKPDGKPEFEEADTPEKLRTLLAEKLSSRPEAVHEYVTPLFVSRAPNRKMSGQGHMETVKSAKRLDEGVSVLRVPLTQLKLKDLEKMVNREREPKLYEALKARLEAHKDDPAKAFAEPFYKYDKAGNRTQQVKAVRVEQVQKTGVWVRNHNGIADNATMVRVDVFEKGDKYYLVPIYSWQVAKGILPDRAVVQGKDEEDWQLIDDSFNFKFSLHPNDLVEVITKKARMFGYFASCHRGTGNINIRIHDLDHKIGKNGILEGIGVKTALSFQKYQIDELGKEIRPCRLKKRPPVR

SEQ ID NO: 114 - protein, 1334 aa, Listeria monocytogenes
MKKPYTIGLDIGTNSVGWAVLTDQYDLVKRKMKISGDSEKKQIKKNFWGVRLFEKGETAAKRRMSRTARRRIERRRNRISYLQEIFAIQMNEVDDNFFNRLKESFYAESDKKYNRHPFFGTVEEEVAYYKDFPTIYHLRKELIDSQKKADLRLVYLALAHIIKYRGHFLIEGALDTKNTSIDEMFKQFLQIYNQVFANDIEEASLKKTEKNQEVAQILAEKFTRKDKLDKILSLYPGEKTTGVFAQFVNIIVGSTGKFKKHFNLHEKKDINCAEDTYDTDLESLLAIIGDEFAEVFVAAKNAYNAVVLSNIITVTDSTTRAKLSASLIERFENHKEDLKKMKRFVRTYLPEKYDEIFDDTEKHGYAGYISGKTKQADFYKYMKATLEKIEGADYFIAKIEEENFLRKQRTFDNGVIPHQLHLEELEAILHQQAKYYPFLREDYEKIKSLVTFRIPYFVGPLAKGQSEFAWLTRKADGEIRPWNIEEKVDFGKSAVDFIEKMTNKDTYLPKENVLPKHSLCYQKYMVYNELTKVRYIDDQGKTNYFSGQEKQQIFNDLFKQKRKVKKKDLELFLRNINQIESPTIEGLEDSFNASYATYHDLLKVGMKQEILDNPLNTEMLEDIVKILTVFEDKRMIKEQLQQFSDVLDGTVLKKLERRHYTGWGRLSAKLLVGIRDKQSHLTILDYLMNDDGLNRNLMQLINDSNLSFKSIIEKEQVSTTDKDLQSIVAELAGSPAIKKGILQSLKIVDELVSVMGYPPQTIVVEMARENQTTNKGKNNSKPRYKSLEKAIKEFGSQILKEHPTDNQELKNNRLYLYYLQNGKDMYTGQELDIHNLSNYDIDHIVPQSFITDNSVDNLVLTSSAGNREKGDNVPPLEIVQKRKIFWEKLYQGNLMSKRKFDYLTKAERGGLTEADKARFIHRQLVETRQITKNVANILHQRFNYKTDGNKDTMETVRIVTLKSALVSQFRKQFQFYKVREVNDYHHAHDAYLNGVVANTLLKVYPQLEPEFVYGEYHQFGWFKANKATAKKQFYTNIMLFFAQKDRIIDENGEILWDKRYLETVKKVLGYRQMNIVKKTEIQKGEFSNVTPNPKGKSNKLIPRKKDWDPIKYGGFDGSKMAYAIIIEYEKQKRKVRIEKKLIQINIMEREAFEKDEKTFLEEKGYHQPKVLIKVPKYTLYECKNGRRRMLGSANEAHKGNQMLLPNHLMALLYHAEKYEAIDGESLAYIEVHRALFDELLAYISEFARKYTLSNDRLDEINMLYERNKDGDVKSIAESFVSLKKFNAFGVHQDFSFFGTKIERKRDRKLNELLNSTIIYQSITGLYESRKRLDN

SEQ ID NO: 115 - protein, 1337 aa, Enterococcus faecalis
MKKDYVIGLDIGTNSVGWAVMTEDYQLVKKKMPIYGNTEKKKIKKNFWGVRLFEEGHTAEDRRLKRTARRRISRRRNRLRYLQAFFEEAMTALDENFFARLQESFLVPEDKKWHRHPIFAKLEDEVAYHETYPTIYHLRKKLADSSEQADLRLIYLALAHIVKYRGHFLIEGKLSTENISVKEQFQQFMIIYNQTFVNGESRLVSAPLPESVLIEEELTEKASRTKKSEKVLQQFPQEKANGLFGQFLKLMVGNKADFKKVFGLEEEAKITYASESYEEDLEGILAKVGDEYSDVFLAAKNVYDAVELSTILADSDKKSHAKLSSSMIVRFTEHQEDLKKFKRFIRENCPDEYDNLFKNEQKDGYAGYIAHAGKVSQLKFYQYVKKIIQDIAGAEYFLEKIAQENFLRKQRTFDNGVIPHQIHLAELQAIIHRQAAYYPFLKENQEKIEQLVTFRIPYYIGPLSKGDASTFAWLKRQSEEPIRPWNLQETVDLDQSATAFIERMTNFDTYLSSEKVLPKHSLLYEKFMVFNELTKISYTDDRGIKANFSGKEKEKIFDYLFKTRRKVKKKDIIQFYRNEYNTEIVTLSGLEEDQFNASFSTYQDLLKCGLTRAELDHPDNAEKLEDIIKILTIFEDRQRIRTQLSTFKGQFSAEVLKKLERKHYTGWGRLSKKLINGIYDKESGKTILGYLIKDDGVSKHYNRNFMQLINDSQLSFKNAIQKAQSSEHEETLSETVNELAGSPAIKKGIYQSLKIVDELVAIMGYAPKRIVVEMARENQTTSTGKRRSIQRLKIVEKAMAEIGSNLLKEQPTTNEQLRDTRLFLYYMQNGKDMYTGDELSLHRLSHYDIDHIIPQSFMKDDSLDNLVLVGSTENRGKSDDVPSKEVVKDMKAYWEKLYAAGLISQRKFQRLTKGEQGGLTLEDKAHFIQRQLVETRQITKNVAGILDQRYNANSKEKKVQIITLKASLTSQFRSIFGLYKVREVNDYHHGQDAYLNCVVATTLLKVYPNLAPEFVYGEYPKFQAFKENKATAKAIIYTNLLRFFTEDEPRFTKDGEILWSNSYLKTIKKELNYHQMNIVKKVEVQKGGFSKESIKPKGPSNKLIPVKNGLDPQKYGGFDSPVVAYTVLFTHEKGKKPLIKQEILGITIMEKTRFEQNPILFLEEKGFLRPRVLMKLPKYTLYEFPEGRRRLLASAKEAQKGNQMVLPEHLLTLLYHAKQCLLPNQSESLAYVEQHQPEFQEILERVVDFAEVHTLAKSKVQQIVKLFEANQTADVKEIAASFIQLMQFNAMGAPSTFKFFQKDIERARYTSIKEIFDATIIYQSTTGLYETRRKVVD

SEQ ID NO: 116 - protein, 1426 aa, Capnocytophaga ochracea
MKNILGLDLGTTSIGFAHIVEDENKEKSEIKELGVRIVSLTTDEQSDFEKGKSITTNANRTLKHGARLNLDRYQQRRKYLIDLLQKANLITPSSILAENGKNTTHSTWQLRAKAVTERIEKEEFARILLAINKKRGYKSSRKAKTEDEGQAIDGMAIAKRLYDENLTPGQLSLQLLQQNKKLLPDFYRSDLQKEFDLVWNFQKQFYPDILTDIFYKELQGKGKDATSKAFSKRYHFDTTENKGSKESVRLQAYQWRAEAISKQLSKEEVAYVLTEINNNLNNASGYLGAISDRSKELYFNRQTVGQYLYAKLQENRHNSLKNKVFYRQDYLDEFERIWETQASFHKELTDELKKQIRDVVIFYQRKPKSQKGLISFCEFESKEIEIEKDGKTITKNIGARVVPKSSPLFQEFKIWQILNNVICKRKGIRKKKISAKTTQLDLLNESSQTIFSLDMECKQLLFDELNLKGDLKSDKVLKLLGYSPQEWEINYNQLEGNRTQKALYEAYLKIVEMEAHDVKDILQIKSAKDDWSLDESPLSASEIREKVKAIFQTLGICTKILYFDPLLPVKEFEEQDSYQLWHLLYSYESDDSTSGNETLYRILEKKYAFKREHARILANVALQDDYGSLSTKAIRKIYPNIKENQYSTACEKAGYKHSKLSLTTEELEARELKNIIPLLKKNALRNPVVEKILNQMINVVNALIEKNSERDAEGKITKYFHFDEIRIELARELKKNAQKRYEMTQNINKAKLEHQKISEILQKEFGIKNPTKSDIIRYRLYQELEHNGYKELYTNAPIARDMLFSKNIEIEHIVPKARVFDDSFSNKTLTFHRINSDKGEYTAFDYITSLNSEEELNQYLTRVENAYKTKSISPTKYKNLLKKASEIGDDFINRDLRDTQYIAKKAKEILFQVTKNVLSTSGSITDRLREDWGLVDVMKELNMPKYQSLGLTEVEERKDGNKVTVIKNWTKRNDHRHHAMDALTVAFTKPSYIQYLNHLNARKDENNKNYSVILAIEEKETIKVPTNNGKNKRVFIEPIPNFRQVAKKHLEEIFISHKAKNKVVTKNTNKPAGTDKQQITLTPRGQLHKETIYGKYQYYINKEEKIGVKFDERTIAKVSNPVYREALLKRLQANDNDPKKAFAGKNALSKNPIYLDESKTKTLPEKVNLTYLEEDFSIRKDISPDNFKDLKSIEKVIDQGVKRILIKRLQAYDNDPKKAFVDLEKNPIWLNKEKGIAIKRVTISGVNNAQPLHIGKDHLGKTTLNKEGKEIPVDYVSTGNNHHVAIYRDKEGNLQEQIVSFFDAVVRAQQGIPIIDKTYKQAEGWQFLFTMKQNEMFVFPNATTGFNPAEIDLLDPKNKKLISPNLFRVQKIATKDYFFRHHLETNVETDNILKNVTWKREGLSGLKDIVKVRINHLGDIVSIGEY

SEQ ID NO: 117 - protein, 1424 aa, Parabacteroides sp.
MKRILGLDLGTNSIGWALVNEAETDEEVSSIIRLGVRVNPLTVDETQNFEKGKSITTNAERTLKRSMRRNLQRYKLRRDALVEFLKELGFITDETILSEQGNRTTFETCRLRAKAAEEEISLEELSRVLLMINKKRGYKSSRKVKKEEDGVLIDGMEIAKKLYEEDLTPGQLCSQLLESGKKVLPDFYRSDLQEELDRIWSVQKQFHPDVFCDAAKEEIKGKNRSQTWAILANYFVWKEEVVGWNDREAKNETIEKECKLVGLKRTTKGYELKKENYRWRAQALTEQLGLEEIAVVLQEINGQINASSGYLGAISDRSKVLYFNHQTVGQYQMAELDKNPHASLRNMVFYRQDYLDEFDRIWEKQAEFHKELTAELKKEIRDMIIFYQRRLKSQKGLISFCEFERLEIVVEKDGKKQTKVIGCKVIPRSHPLFQEFKVWQTLNDIKVLGREKKRNALSASESRALYPEEKEILARELAIKENMKKADVLKLLFENPQELDLNFKQIDGNRTGFSLFSAYSKMIEKYGYEPLDFKKPADEIIGQLRTIFTDLGWNTNLFTIDLTKEGKELEMQPYFRLWHLLYSFEGDNTSTGNGKLIEKIMQLCGVEKEYAVELASLSFQDDYGSLSAKAIKRILPYLKEGNLYDVACEYAGYRHSKSSLTKEEIENKVLKGKLEVLPKNSLRNPVVEKILSQMVNVINTIIDTYGKPDEIRVELARELKKSAKEREELTKAIAKSTREHEEIRKLLQDEFGMMNVSRNDIIRYKLYEELKDNGYKTLYSNQYIPKEKIFSKEIDIEHIIPQSRLFDDSLSNKTLEYKAINIEKGNKTAYDFVKEKYGEEGLQQYINRCESLFNDKKAKLRKLKMEQKDIPDGFIDRDLRNTQYIAKKALAMLNEICRRVVATTGSITDQLREDWQLVDVMKELNLPKYEALGFVETYEDKDGRKIKRIKDWTKRNDHRHHAMDALTVAFTKDAFIQYFNNKNAAQDSGNRNHTNIIGIKTRYFDKGRALPPIPLEQFRIEAKQHLEKLLVSIKAKNKVVTVNVNRTKKRKGENTKIQQTPRGQLHLETVYGSHKQYVTKIEKVNASFDAAKIATVSKRAYRNALLKRLETFGNDPKKAFTGKNALEKNPLYADKYQTIRVPEKVQTVEFETIYTIRKPVDPALNVDKVVDVKVRAILERRLKEYGGDPKKAFVNFWENPIWLNKEKGISIKRVSIRGINNAQSIHVKKDKNGNPIWDENGKQIPVDFVNTGNNHHVAIYRKPVLDKKGQVTFDEDGNLMYELDEVVVPFFEAVTRANLGLPIIDKDYRKSEGWQFLFSMKQNEYFVFPNEKTGFNPKEVDLLNPDNYAMISPNLFRVQTMSKVMYGNNVVRDYKFRHHLETTVKDMKELKDIAYKQYKTLSFGNSVVKIRINHIGQIVSVGEY

SEQ ID NO: 118 - protein, 1395 aa, Lactobacillus jensenii
MKEIKDYIIGLDIGTNSCGYVVTDKQNNILKLKGKTAIGARLFKEGQAAADRRSFRTTRRRLARRHWRLGLLEEIFDPEMEKIDPNFFRRLKESDYSPKDSRKQFNAIVFKSIKADKRFYKKYPTIYHLRNALMHDNQKHDLREIFMAVHHIVKYRGNFLREDSVNAFKAAKFSLRGEDGIGPVDKLNDLLKEIYSEYSPELATNNLSKIEDIIKDKNLYKQDKLKQVATLLIKEADSKDKAKLNKDIAKQVANSFMGYMFRLDTLFSLTDVDVKDYKLKFSDANIDESLDDLTSLLTDAQIEFVLELQSIYNTIVLNEIVPDGMSLSESMIKKYDDHKEDLKIFKEYIDSLSDQKKAKKLLSAYNLYVNYRKSDLVEAKNLFKNKKVGDKNFADVISNFEVFGKFVSDNLDDSELANKIKARLDLGEFLPKQRTNQNGVIPYQLHQVELTQILEKQGKYYPFLITPNPVESHRNNAPYEISELVSFRVPYYVGPLIDNQSIKDKQNKNKFAWMVRQKQGQITPWNLEEMVDTTESANQFIKRMTRKDTYLLAEDVLPKSSLVYQKFMILDELNRIKIDGKKLTSELKHDIFEKLFKKQKSINLDNLKNYLLVEGNIPGLIEGLSDGINFNNSFSTYIDYRNIFGDEIDNPNKQADFEKMIEWSTVFEDRKIFKRKLKEITWLTSEQIKQVSSKRYSGWGRLSKKLLTQITDENGVNILQRLWNEPETLTEVLANPVIKRKIVEANSSFTKAKDMKDILVEAYTSPQNKKAIRQVMRVVDDIIAAAHGKKPSQIAIEFAREDQDNPQMTKSRKAQLDQIYAKISDEFLDDAVKNELKNMKDNKPLAKDKVFLYFKQMGRDAYSGEKLSLDNLQDYDIDHIYPQSFIKDDSFDNRVLVQRAYNNGKSDNVPVLLFGNKIAAGLGITIRQMWKKWLELGLISKRKFNNLITDPEKISRNMASGFVNRQLVETSQVIKLVANILQAKLPDTEIIEVKASYNSILRKEFNLYKSREVNDYHHAIDAYLTTIVGNYLYQVYPKLRPYFVYGQFKKFGKAENQEDDPVKKIKKFNFIYQLIWGKDDAICISHTNQQVFSKKDIIDKLTTAYNFKYMNISHAVYTRNNNMFKQTLFPIIERTTAKTKSLIPKKLDRPTDIYGGYSNNNDAYLALVKVDKKRGSEYRVVGIPMRAAAMLKASKNYDEDLRKVIEPMVMFDKNGKAKRGIEGFRVLVGKMPFKQAVLDGNKKFMLTGTVDTPNLKQLVLSQQNMKYILDYIEDVDCRKHKFGDKVQNPDKCLLEVFDEIIEIVDKYFELFDSRDFREKLRNSRNKFIKLEASKKADTILAILKGLQAKSTRATIKELNISDFGRIITSSISPEAQLIYQSPTGLFERRVKVKDL

SEQ ID NO: 119 - protein, 1140 aa, Roseburia intestinalis
MRENGSDERRRNMDEKMDYRIGLDIGIASVGWAVLQNNSDDEPVRIVDLGVRIFDTAEIPKTGESLAGPRRAARTTRRRLRRRKHRLDRIKWLFENQGLINIDDFLKRYNMAGLPDVYQLRYEALDRKLTDEELAQVLLHIAKHRGFRSTRKAETAAKENGAVLKATDENQKRMQEKGYRTVGEMIYLDEAFRTGCSWSEKGYILTPRNKAENYQHTMLRAMLVEEVKEIFSSQRRLGNEKATEELEEKYLEIMTSQRSFDLGPGMQPDGKPSPYAMEGFSDRVGKCTFLGDQGELRGAKGTYTAEYFVALQKINHTKLVNQDGETRNFTEEERRALTLLLFTQKEVKYAAVRKKLGLPEDILFYNLNYKKAATKEEQQKENQNTEKAKFIGMPYYHDYKKCLEERVKYLTENEVRDLFDEIGMILTCYKNDDSRTERLAKLGLVPIEMEGLLAYTPTKFQHLSMKAMRNIIPFLEKGMTYDKACEEAGYDFKADSKGTKQKLLTGENVNQTINEITNPVVKRSVSQTVKVINAIIRTYGSPQAINIELAREMSKTFEERRKIKGDMEKRQKNNEDVKKQIQELGKLSPTGQDILKYRLWQEQQGICMYSGKTIPLEELFKPGYDIDHILPYSITFDDSFRNKVLVTSQENRQKGNRTPYEYMGNDEQRWNEFETRVKTTIRDYKKQQKLLKKHFSEEERSEFKERNLTDTKYITTVIYNMIRQNLEMAPLNRPEKKKQVRAVNGAITAYLRKRWGLPQKNRETDTHHAMDAVVIACCTDGMIQKISRYTKVRERCYSKGTEFVDAETGEIFRPEDYSRAEWDEIFGVHIPKPWETFRAELDVRMGDDPKGFLDTHSDVALELDYPEYIYENLRPIFVSRMPNHKVTGAAHADTIRSPRHFKDEGIVLTKTALTDLKLDKDGEIDGYYNPQSDLLLYEALKKQLLLYGNDAKKAFAQDFHKPKADGTEGPVVRKVKIQKKQTMGVFVDSGNGIAENGGMVRIDVFRVNGKYYFVPVYTADVVKKVLPNRASTAHKPYGEWKVMEDKDFLFSLYSRDLIHIKSKKDIPIKMVNGGMEGIKETYAYYIGADISAANIQGIAHDSRYKFRGLGIQSLDVLEKCQIDVLGHVSVVRSEKRMGFS

SEQ ID NO: 120 - protein, 992 aa, Treponema vincentii
MQKNSGEDENCGFEFLTEEEKELIKPLFFRISKPSFQFADIEKKLKGKNGFWKFNYRKDTNVSGCPVSAGLKNIFGDEASAESWKDKKVGQYDMCDIWHVLFDFDDEEKLLEFAKRKLFLSDEAAKKFCAIRIQQGYANLSLKAIRKITPFLRKGYIYSTAVFLANIPFMIGRDIFLQNEKEIEDSVKNIIGTLRDKNNIIVLANRCIESAFKDKDNDFRFEEWDKALVENSAWDLFGKKKWNEYDEEKRKTIISQVSEKVEDNLKIAVGKNPNDYKYPLLRTDDLIMDYLNQKGFVVKGELYHPSDTDYNFETPVPAEDGKIYLASPRSPSVKNPVVMRALHQLRKLVNYLIKTGKIDSTTKINVELANDVNDKNQRKAIEELAKTNEKNNADARKKIEELCNEAGFKVVPTESDIKKFRLWKEQNETCPYTGKHISFTDLFGPIPKFDFEHTIPRSLSYDDSLENLTLCDSEFNRNIKKQRLPSELPDFEEINKRFLKFYEDKIDNCLRIIELNSKSGGSYEEPAVKDLRIVKKHKAQYELNYYKEKLRRFSSTEITSGFKHSQLNDTRIITKFSLSYLKGVFDHVQPVKGSMTDTFKRQWGLMERNEIKDRSNHTHHTVDALTVACINRGKFNLLSEAIKNSSDGKHLKFPKPWETFDTDVLNAVRYIIPKYFSDESSLRQSKKILRGRDGKPVLKNGKAVFIQGATARGSLHKDTFYGCIKTVPEKGGKSEMIFVQRIPVSTLDEKVAEKIIDKRIRKTFEKNLSTGIQTLQEIQTDGILLPFKKEGRDVFVKRVRIKAHPTSPIILKKHHNVINKNPKDYKQNYYVENEENYLLAIYRGKDAKGKDVSDHKLCNLLNAVKSRQNKTGFYPDFKEKKGINLQLYKVLKIGKIVILQNDIQEDVFALPKEKLWKRMYRIAGLATSRNDIQIKLVHIIRETPWGYMKGEKDLNAGKECLLYGTANFKGLVEGQDFTVSPAGEIIQKARVC

SEQ ID NO: 121 - protein, 1340 aa, Enterococcus faecium
MKKEYTIGLDIGTNSVGWSVLTDDYRLVSKKMKVAGNTEKSSTKKNFWGVRLFDEGQTAEARRSKRTARRRLARRRQRILELQKIFAPEILKIDEHFFARLNESFLVPDEKKQSRHPVFATIKQEKSYHQTYPTIYHLRQALADSSEKADIRLVYLAMAHLLKYRGHFLIEGELNTENSSVTETFRQFLSTYNQQFSEAGDKQTEKLDEAVDCSFVFTEKMSKTKKAETLLKYFPHEKSNGYLSQFIKLMVGNQGNFKNVFGLEEEAKLQFSKETYEEDLEELLEKIGDDYIDLFVQAKNVYDAVLLSEILSDSTKNTRAKLSAGMIRRYDAHKEDLVLLKRFVKENLPKKYRAFFGDNSVNGYAGYIEGHATQEAFYKFVKKELTGIRGSEVFLTKIEQENFLRKQRTFDNGVIPHQIHLSELRAIIANQKKHYPFLKEEQEKLESLLTFKIPYYVGPLAKKQENSPFAWLIRKSEEKIKPWNLPEIVDMEGSAVRFIERMINTDMYMPHNKVLPKNSLLYQKFSIYNELTKVRYQDERGQMNYFSSIEKKEIFHELFEKNRKVTKKDLQEFLYLKYDIKHAELSGIEKAFNASYTTYHDFLTMSENKREMKQWLEDPELASMFEEIIKTLTVFEDREMIKTRLSHHEATLGKHIIKKLTKKHYTGWGRLSKELIQGIRDKQSNKTILDYLINDDDFPHHRNRNFMQLINDDSLSFKKEIKKAQMITDTENLEEIVKELTGSPAIKKGILQSLKIVDEIVGIMGYEPANIVVEMARENQTTGRGLKSSRPRLKALEESLKDFGSQLLKEYPTDNSSLQKDRLYLYYLQNGRDMYTGAPLDIHRLSDYDIDHIIPRSFTTDNSIDNKVLVSSKENRLKKDDVPSEKVVKKMRSFWYDLYSSKLISKRKLDNLTKIKLTEEDKAGFIKRQLVETRQITKHVAGILHHRFNKAEDTNDPIRKVRIITLKSALVSQFRNRFGIYKVREINEYHHAHDAYLNGVVALALLKKYPQLAPEFVYGEYLKFNAHKANKATVKKEFYSNIMKFFESDTPVCDENGEIFWDKSKSIAQVKKVINHHHMNIVKKTEIQKGGFSKETVEPKKDSSKLLPRKNNWDPAKYGGLGSPNVAYTVAFTYEKGKARKRTNALEGITIMEREAFEQSPVLFLKNKGYEQAEIEMKLPKYALFELENGRKRMVASNKEAQKANSFLLPEHLVTLLYHAKQYDEISHKESFDYVNEHHKEFSEVFARVLEFAGKYTLAEKNIEKLEKIYKENQTDDLAKLASSFVNLMQFNAMGAPADFKFFDVTIPRKRYTSLTEIWQSTIIHQSITGLYETRIRMGK

SEQ ID NO: 122 - protein, 1363 aa, Lactobacillus rhamnosus
MTKLNQPYGIGLDIGSNSIGFAVVDANSHLLRLKGETAIGARLFREGQSAADRRGSRTTRRRLSRTRWRLSFLRDFFAPHITKIDPDFFLRQKYSEISPKDKDRFKYEKRLFNDRTDAEFYEDYPSMYHLRLHLMTHTHKADPREIFLAIHHILKSRGHFLTPGAAKDFNTDKVDLEDIFPALTEAYAQVYPDLELTFDLAKADDFKAKLLDEQATPSDTQKALVNLLLSSDGEKEIVKKRKQVLTEFAKAITGLKTKFNLALGTEVDEADASNWQFSMGQLDDKWSNIETSMTDQGTEIFEQIQELYRARLLNGIVPAGMSLSQAKVADYGQHKEDLELFKTYLKKLNDHELAKTIRGLYDRYINGDDAKPFLREDFVKALTKEVTAHPNEVSEQLLNRMGQANFMLKQRTKANGAIPIQLQQRELDQIIANQSKYYDWLAAPNPVEAHRWKMPYQLDELLNFHIPYYVGPLITPKQQAESGENVFAWMVRKDPSGNITPYNFDEKVDREASANTFIQRMKTTDTYLIGEDVLPKQSLLYQKYEVLNELNNVRINNECLGTDQKQRLIREVFERHSSVTIKQVADNLVAHGDFARRPEIRGLADEKRFLSSLSTYHQLKEILHEAIDDPTKLLDIENIITWSTVFEDHTIFETKLAEIEWLDPKKINELSGIRYRGWGQFSRKLLDGLKLGNGHTVIQELMLSNHNLMQILADETLKETMTELNQDKLKTDDIEDVINDAYTSPSNKKALRQVLRVVEDIKHAANGQDPSWLFIETADGTGTAGKRTQSRQKQIQTVYANAAQELIDSAVRGELEDKIADKASFTDRLVLYFMQGGRDIYTGAPLNIDQLSHYDIDHILPQSLIKDDSLDNRVLVNATINREKNNVFASTLFAGKMKATWRKWHEAGLISGRKLRNLMLRPDEIDKFAKGFVARQLVETRQIIKLTEQIAAAQYPNTKIIAVKAGLSHQLREELDFPKNRDVNHYHHAFDAFLAARIGTYLLKRYPKLAPFFTYGEFAKVDVKKFREFNFIGALTHAKKNIIAKDTGEIVWDKERDIRELDRIYNFKRMLITHEVYFETADLFKQTIYAAKDSKERGGSKQLIPKKQGYPTQVYGGYTQESGSYNALVRVAEADTTAYQVIKISAQNASKIASANLKSREKGKQLLNEIVVKQLAKRRKNWKPSANSFKIVIPRFGMGTLFQNAKYGLFMVNSDTYYRNYQELWLSRENQKLLKKLFSIKYEKTQMNHDALQVYKAIIDQVEKFFKLYDINQFRAKLSDAIERFEKLPINTDGNKIGKTETLRQILIGLQANGTRSNVKNLGIKTDLGLLQVGSGIKLDKDTQIVYQSPSGLFKRRIPLADL

SEQ ID NO: 123 - protein, 1234 aa, Prevotella tannerae
MPNFWSIFTENLQTYLMKTRILGLDTGTNSLGWAVVDRDENNQYTPICRGDLIFTEGVKQEKGIEFSLAAERTSYRASRRHYFRRRLRKVEVLKVLVKHKLCPPLSDEALNRWHTKKEYPLDEDFILWQRTNEADNKNPYHDRHICLHRKLNLKDSQTDRYTLGRALYHLTQRRGFLSNRLDQNEEAEETGKVKSAISELSKEMKEAGCEFLGDYFYLLYRTEGNRVRIRSRYTDREKHYLQEFKEICRVQELDEDLAKALEKTIFFQRPLKSQRQGVGKCTMEKGHSRCAVSHPLYEEYRLLCYLNNIRIKTPSDDRLRPLNAEEREKITPLFYKEKNFDFEKIAKKLAGKTPFGWIRDAEDWPYQFNYRMTQEAPACPTTAQLIKVFGEDWKAALAETYTMSAKQDGTLKTEDEICTDIWNVLYSFSSKEKLKEFGLKKLQLDEVQAKAFSEIRLTRDFASLSLKAIRKILFFLRTGEDYSKAIFLANIPTIVGEEIWNDIERRSRLLYKVDLALRPQEERDAEEHRTIAERIKAAVAAEVPDAPIDLLYHPSMIEAYPDAKRNERFDCYQLGSPKTNAVRNPMAMRSLHMVRKVINHLLRKHIIDEKTEIHIEYARELNDANKRQAIADWQRELSKRHTAYAQNIRQLYKAETGLVIEPTKADILKYQLWEEQQHVCLYTGKKIGIADFLGANPKFDIEHTIPRSRGGDSTQENLTLCESKFNRDIKRDKLPTELANYEEILARIEHWKKQCYALKLKRDGIRTHSGLEKSIKDSRIRRRHLVGLEYGYLKGKYDRFTMKEVPEGFSRRQGAGIGLISKYAGLFLKSLFKDPKNPNRSNVYVVKGAITAEFRKLWGLQQADEAKSRENHTHHCIDAYTIACIGPCEYAALAAYYRSDEEFKYGRRREKPQFEKPWPTFTEDLLKLQEELLIVHQTTDKLGKRDRRKVKTPRGKFLTGGDSARGRLHQETYYGAINYDGNIKYVVRKPLDSLTEKDLDKIVDETVMGIVKGAVEAKGSLKEALADGIYMNKEKGILIKRVRIFSDVSEPINLKQLRDVSTKEYKRHIHLRKDENYLFAIYEGIDKKKNKKQTETATVDYLDAAKFYKDSKRRDKANSLVGDYSKKNKLPLKCILKKRQMVLFYEHSPEEIRFKDKKDLSRRLYIVTSIAKDGRVKFLHHQAATATGIQSSPSPFTNDGEHQPYYRLSASNIKVLVAGIDFDINILGEITPKL

SEQ ID NO: 124 - protein, 1496 aa, Prevotella veroralis
MKTILGLDLGTNSIGWAKVCVDDNGNYLRDIKLGSRIIPMSQDVLGNFDKGVTESQTSVRTGFRGVRRIRERSLLRRERLHRVLHVLGYLPPHYDSAIGWNKNEPSTYGKFLNHGEPKLAWEHKEDGSMRFLFMESFHEMMADFAKSQPSLVSDGKKIPLDWTIYYLRKKALSQPIRKEELAWLLLNFNQKRGYYQLRGEEDDDNPTKCEEYYELKVVGIEADEEGKNGNTWYNVKLENGWIYRRQSKIPLDDWIGKVREFIVTTEYEKDGITLKKDKNGDVKRSFRSPSEDDWGLRKKRTEKLLDSSKMTVGAFVYDHLLAEPSDKIRGKFIRTIERKYYKKELYAILCEQSKYHEELRSGDYLNKCAEELYKNNQPHRNSLLTKDLAYLLLEDLIFYQRPLKTKKSLIAECPYEAYKYVDKETGEIKRQGIKCIAKSNPYYQEFRLWQFISNLRLFNKADDKEVTADYLPTQDDYVRLFAYLNDRKEINQETLLKEFFKLKKITVNSEKVFPIRWNYIEDKEKKYPCNETRHELLLALDRARIDHSWLEKPGQEYRLWHLLYSVESKEETKEALRKLKDDDAFVESFLKVKPFKREYGAYSEKAIKKLLAVMRMGSLWRETDICDTTKGNITKILQGEIDEKLKEKISASVSSYNQLSDFQGLPVWLACYVVYGRHSEAAEIQHWKTPESLLAYINGFKQHSLRNPIVEQCILETLRTVHDIWKEVGHIDEIHVELGRNMKSTADQRARISENVLRNENTNLRIKSLLLELKNDPNIKDVRPYSPMQQEKLRIYEEGVLQELTKDDKDFTEITKISTMAQPSAKELQRYKLWLEQKYRSPYTGKSISLTKLFTSAYQIEHVIPQSRYFDDSFSNKVICESEVNSLKDNMLGYEFIKNHGGEIIHCTMLGDVKVLSESEYKAFVNDHYAHNKRKRENLLLEDIPQEFLNRQMNDSRYISKVVKALLSNIVRAEGEEEATSKFVVSCSGGITDRLKKDWGLNDVWNKIVYPRFERLNRLTGTEAFGQWENKDGKRVFQTAVPLELQRGFNKKRIDHRHHAMDALVIACTSRNIINYLNNESANNPKKREDLRQKLCDKNRTIRKPWETFTQDATAALEDVIVSFKNYVRIINKATNYYERYDVEGKKVIAEQRGDDMWAIRKPMHEATYYGRVNLRRKKKVNLRVALENISSICDNKLRIYINGLVEKGFNTKQILDKFKNTNDHFSMQKIDKVEIWQFTNEEEKLVATRKPLDTSFDTKKIASITDTGIQTILLNYLETKGGDSTIAFTPEGIVEMNQNISKYNNGKEHMPILKVRLYTKLGKKIPVGQTGCKAKQFVIAEAGTNLYFAIYEDEEGKRSYRTIPLNEVVERLKQGLSPVPEKNDKDVHLKFYLSPNDLVYVPIEDEHESLAKDHIYKFVDSSGTTANFIPHRSANVIFELNKKDAEKFCSGSIIQNEYGVGSSQSKNQKAITGEMIKAVCRKLEVDRLGNVIKVI

SEQ ID NO: 125 - protein, 1082 aa, Neisseria cinerea
MAAFKPNPMNYILGLDIGIASVGWAIVEIDEEENPIRLIDLGVRVFERAEVPKTGDSLAAARRLARSVRRLTRRRAHRLLRARRLLKREGVLQAADFDENGLIKSLPNTPWQLRAAALDRKLTPLEWSAVLLHLIKHRGYLSQRKNEGETADKELGALLKGVADNTHALQTGDFRTPAELALNKFEKESGHIRNQRGDYSHTFNRKDLQAELNLLFEKQKEFGNPHVSDGLKEGIETLLMTQRPALSGDAVQKMLGHCTFEPTEPKAAKNTYTAERFVWLTKLNNLRILEQGSERPLTDTERATLMDEPYRKSKLTYAQARKLLDLDDTAFFKGLRYGKDNAEASTLMEMKAYHAISRALEKEGLKDKKSPLNLSPELQDEIGTAFSLFKTDEDITGRLKDRVQPEILEALLKHISFDKFVQISLKALRRIVPLMEQGNRYDEACTEIYGDHYGKKNTEEKIYLPPIPADEIRNPVVLRALSQARKVINGVVRRYGSPARIHIETAREVGKSFKDRKEIEKRQEENRKDREKSAAKFREYFPNFVGEPKSKDILKLRLYEQQHGKCLYSGKEINLGRLNEKGYVEIDHALPFSRTWDDSFNNKVLALGSENQNKGNQTPYEYFNGKDNSREWQEFKARVETSRFPRSKKQRILLQKFDEDGFKERNLNDTRYINRFLCQFVADHMLLTGKGKRRVFASNGQITNLLRGFWGLRKVRAENDRHHALDAVVVACSTIAMQQKITRFVRYKEMNAFDGKTIDKETGEVLHQKAHFPQPWEFFAQEVMIRVFGKPDGKPEFEEADTPEKLRTLLAEKLSSRPEAVHKYVTPLFISRAPNRKMSGQGHMETVKSAKRLDEGISVLRVPLTQLKLKDLEKMVNREREPKLYEALKARLEAHKDDPAKAFAEPFYKYDKAGNRTQQVKAVRVEQVQKTGVWVHNHNGIADNATIVRVDVFEKGGKYYLVPIYSWQVAKGILPDRAVVQGKDEEDWTVMDDSFEFKFVLYANDLIKLTAKKNEFLGYFVSLNRATGAIDIRTHDTDSTKGKNGIFQSVGVKTALSFQKYQIDELGKEIRPCRLKKRPPVR

SEQ ID NO: 126 - protein, 1512 aa, Fibrobacter succinogenes
MKKILGLDLGTNSIGWAVVNADEITRDDGSRYLKPNGISAAGSRIIPMSADILGDFEKGNSISQTAERTRMRMARRLHERALLRRERLLRVLNLLDFLPKHFADKIDRYGKFTDDSEPKLAWRKNTEGKYEFIFQDAFNEMLAEFKDKQPEIVEEGKKIPYDWTIYYLRKKALEKALSKEELSWILLQFNQKRGYYQLRGEEEEIPQDKKIEYLAQKVVKVEATDQKKGDDVWYNVYLENGMIYRRTSKAPLDWEGKVKEFIVTTEVENDGETPKKDKEGNIKRSFRAPKEDDWTLLKKKTEADIENSHKTVGCYIYDSLLNNPKQKIIGKLVRTVERKFYKEELTQILKKQVELIPELRDDNLYKQCIEELYPINEAHRNTIAKTDFANLFINDILFYQRPLKSKKSQIDNCPYEERIFIDSKTGEKKKVPVKCIAKSNPLFQEFRLWQFIQNLRIYQREKEIDGKLLTDIDITSECLKSEEDYVRLFDWLNDRETIEQEDLLKHLFNTKKSKNKENPYRWNYVEDKVYPCNETRATILKGFSKCGINASVLSPELEMALWHILYSVEDKKEIETALTHFAQKQGWNDDFAKVFSKAKPFKKDYGSYSEKAIKKLLSLMRMGKYWNQDNIDKNTLDRIDKIINGEYDEKISNRVRDNAINLKDISDFRGLPVWLACYIVYDRHSEAKDCTKWNSPEEIDSYLKKFKQHSLRNPIVEQVVTETLRTVRDIWIQEEQIDEIHLELGRDLKNPADKRKKMSENILKNENTNLRIKAMLMEFMNPSMGIENVRPYSPSQQDILRIYEENALDNLTKDDKDFDFISKISKQAQPSKTDIIRYKCWLEQKYRSPYTGKTISLSKLFTPAYEIEHVIPQSLYFDDSFSNKVICEAEVNKLKDRQLGYKFIAEHHGEKVQLSQGEVVEILSVDAYEKFVKENYANNRIKMKKLLMESIPDEFIERQLNDSRYISKVVKGLLSNIVREKIDDENYEPEAVSKNLISCNGAITDRLKKDWGMNDVWNSIILPRFIRMNQITGKDCFTTTNAEGHLIPQMPLELQKGFNKKRIDHRHHAMDAIVIACTTRDHVNLLNNEAAHSKFNATRYQLQRKLRRFEKAVIDGKEREVAKEFLKPWDSFSSDSKNILENIIVSFKQNQRVINKTTNAFLHFDENGKKTFIKQGKGDSWAIRKSMHKDTVFGEINLRKVRSVSLNEAIKVPERVLNKKIKEKILELKNNKIDAKNIKKYIEENHTGGYGIDSSKIDVFYFTKETKERFFATRKTLDTSFNQAKIKDSIADSGIQKILLAHLKSKNGDAEQAFSPDGIDEMNKNIVELNNGKFHQPILKVRVYEKADKFAVGQKGNKKVKFVEAAKGTNLFFAIFEKDGKRSYLTIPLNVMIDCQKQYGNQWKNNIEAYLKEKELVEKDVKLQFILSPNDLVYLPTEGSIDKKRIYKVVSFTNNRLYAIPYAIAKSIVDKNEFTQLNKIEFTDNKESIKDACVPVIIDRLGNVIEFNGKRL

SEQ ID NO: 127 - protein, 1259 aa, Streptobacillus moniliformis
MKYILGLDLGVASIGWAVTEINEKGEPVGLIDANSVIFKPLDNDKGKLYNVERRDKRGSRRILRRKKHRVERTKMLLVNSSFLTNEEIDNLYVGKLDNIYEVRLKGLKEQLSKNEIARLMIYYCKNRGFKSNRKTEDLEILKSLGEKISEKDSDEKKLKPIIAKNTELIESKGLTPIEVIYMIRENDNSILGFKNKEGNYKFGFKRNQVIDEVRKILGTQQILSKEIVDEYIDILSSQRDFSDGPGGDSKYKIDYTKLAGKCKYTGEVRAVKSAPSYEIFTMLQKLNDIRYVKFTSEDKIEKKKLSKEVIHKLYDLVVEKNKTLTYDLIEKSIDEENIKLLNIPKLSKSKYVELRKSYFKERNDNENLTEEEINAFNEKLNNERMKQELIRNNLKAYKELKSKFKKNNIDENRIKELGGIYFLDLVAELLTYSKTDEKLEYFVENVERYSLFKEQRDIVEIIKTFPNYTKNGNLSLSLVRELNKLLMEGHDYESSLSSLNYYIDTDVDWEKFPTISEIEDSLSTKITNPNVKHILVILRKLYNTLLFKYGRPEKVHLELSRDFSNDFSTRNKIQKEQLENKVRREVAAFEMYGANKDIVAGKDRLSNDDFVRIKLWEEQNKVCMYSGRTIEKYQLTSAEVQIDHILPYSKSFDNSYSNKVLVFSNENQDKKERTPYQWLKGTEKWNEFKQRVRLNLNISNKKKENLLFEDEVVNNEFLERELHATSYSSRLALNIFQRLIPVSDEDKYDEHGNEKVKYLYNRNVIAFQGKMTSMLRNLYSLNKYTHSFESDTLDIDNKAFILKEFEINKDNLKMTAYNVNTGLEITSETKVEKNKSGEFKTIKDELLKKELDKKENLIEISDYFKDKVLFDLKIVDFEEIDTVEPEIISILYKMITALKEEVYSKNRENHLHHSLDAFLLTIMNRSMQMKLIKYNQLISVLKNKEIEIFNEEKGEYIDSKEFAEELQKQKIIDIDGNERGIKFNVNGKTHRLNLVKPYENFLDDIKNKIFDKRENNKLPYHVVKSKVSGALHAETILGESKGEITKRISVFDINYKNLGKIFDKDGSQKEIYETLVKWLEAKSKDYPKLKNGNIIKKVKIVDGNKDKLIKLGNKRYVEMGRTTVKILVLKKEAEEGLKFASIGRYKYNLLKSEKDVNISIWKDAIHFCKVRYNKLKENGYRLIHELIPGETIELELNKGNISKCLVVGFSGGKIEISSVIGDALDLINDKISTRIKERYYITVSTIKSIKKINKNILGD

SEQ ID NO: 128 - protein, 1091 aa, Mobiluncus mulieris
MDSRKYRVGIDVGTNSVGFAAVEEDDSGSPTRFLNTMVVIHDSGVDPEQKKYAITRLASAGTARRTRRLYRTRRQRLRELDDFISNELGYPLVNLENFADPYEPWKVRADLATTKLPNDELPEAMSIALRHMARHRGWRSPYQRVEALHLHAEISKEFAALKERVVEKTGDVFSDDATPAEVLVDLMGRQKVRGADGVLSGKLRQSDNANELRKIASVQGIDDETLNRIIDRVFSSKSPKGKASERVGMDALPGQGSKPRALKAMPSFQKFRVVSVICNLRIKDSGGDARPLSMEEKEKLIDYLMSSTTDDHVTWTDVADLLHVKRSQLQGTAKEGFDGERPYTRPPVNSTWSKIKDSKIKSLVALWKTGDVDVQSAIVEALSNASVLEDSRPGADIVVAYLESLDDKELESLDKVGLPAGRASYSEDSLERLTERMLRDDCDLFEARKREFNVADDWKPPADPIYAPVGNPGVDRVLKIVNRLLMAAEREWGAPTQINIEHVRSGFSSELMQREFERENERRRAQNEEAVKAILTEKGGNSRVSKYDITRYYAVKRQHCQCLYCGTPITFSDCELDHIVPRKGVGSTNTRVNLAAACRSCNRDKSNLPFAVWAGKASNFDVSIDDAVSRVKQWQRSQNEGVREFRAFQNEVISRLLKTTEDPEIDSRSLESVAWMARELHHRVEYYFQSKGAQTQVSVYRGAVTAQARKSSGLEDKVKMIGGGGKTRLDRRHHAMDAATIALMTPGISTTLSEKNNLRDAQKFTGQSETWKDYCGRTETARKHFAVWKSNMERLTDLFNDKLENDAIPVVQPLRLRLSNSKAHDDGIGKLDSKKLGSVWSLADIDRAATPQIWTALTRCDDFDPTKGLPENANRVIRAQGVKYESEDNIPVFPSNVAAIAVRDGYAEIGSTIHHARIYRIDDGKKTFYSMIRVFAVDLLKHQAEDLFTVKLPPSAISIRTCEDSLRRALSNGTAEYLGWLVPGDEIIVDTSDKAFHTGQIGDLLRNFPVNSFRLTGFPSNSRLRLKPVLLAGEGLRDDAEDSIKKILLGQGWRPAINVLFSKGKPRIVRRNSLGIERPSSNNGLPFSWEA

SEQ ID NO: 129 - protein, 872 aa, Candidatus Parvarchaeum
MLGSSRYLRYNLTSFEGKEPFLIMGYYKEYNKELSSKAQKEFNDQISEFNSYYKLGIDLGDKTGIAIVKGNKIILAKTLIDLHSQKLDKRREARRNRRTRLSRKKRLARLRSWVMRQKVGNQRLPDPYKIMHDNKYWSIYNKSNSANKKNWIDLLIHSNSLSADDFVRGLTIIFRKRGYLAFKYLSRLSDKEFEKYIDNLKPPISKYEYDEDLEELSSRVENGEIEEKKFEGLKNKLDKIDKESKDFQVKQREEVKKELEDLVDLFAKSVDNKIDKARWKRELNNLLDKKVRKIRFDNRFILKCKIKGCNKNTPKKEKVRDFELKMVLNNARSDYQISDEDLNSFRNEVINIFQKKENLKKGELKGVTIEDLRKQLNKTFNKAKIKKGIREQIRSIVFEKISGRSKFCKEHLKEFSEKPAPSDRINYGVNSAREQHDFRVLNFIDKKIFKDKLIDPSKLRYITIESPEPETEKLEKGQISEKSFETLKEKLAKETGGIDIYTGEKLKKDFEIEHIFPRARMGPSIRENEVASNLETNKEKADRTPWEWFGQDEKRWSEFEKRVTSLYSKKKISERKREILLNKSNEYPGLNPTELSRIPSTLSDFVESIRKMFVKYGYEEPQTLVQKGKPIIQVVRGRDTQALRWRWHALDSNIIPEKDRKSSFNHAEDAVIAACMPPYYLRQKIFREEAKIKRKVSNKEKEVTRPDMPTKKIAPNWSEFMKTRNEPVIEVIGKVKPSWKNSIMDQTFYKYLLKPFKDNLIKIPNVKNTYKWIGVNGQTDSLSLPSKVLSISNKKVDSSTVLLVHDKKGGKRNWVPKSIGGLLVYITPKDGPKRIVQVKPATQGLLIYRNEDGRVDAVREFINPVIEMYNNG

SEQ ID NO: 130 - protein, 1229 aa, Pediococcus acidilactici
MGDRKYNLGLDIGTSSIGFAAVDENNQPIRVKGKTAIGVRLFEEGKTAADRRGFRTTRRRLSRRRWRINLLNEIFDAHLAEVDPTFLARLKESNRSNLDPKKSFQGSLLFPERKDYQFYEEYPTIYHLRKALMEKDRKFDIREIYLAVHHIIKYRGNFLNGTPMRSFKVENIELNTLFDQLNQLYAEIVPDNELAFDLAQVADVKDVLSSTTIYKMDKKKQLVKMMLLPASNKALQSENKKIVTQFVNAILNYKFKLDVLLQVETDADWSLKLNDEGADDKLEEFTGDLDENRLEIIDLLQRLHNWFSLNEITKDGNSLSAAMVEKYENHHHHLGLLKKVIENHPDAKKAKALKETYTAYVGKTDDKTQNQDDFYKAVEKNLDDSPDAKGIKRLIQLDQFMPKQRTGQNGAIPHQLHQQELDQIIEKQSKYYPFLAEPNPNVKRRKDAPYKLDELIAFKIPYYVGPLVTPEEQAQNKENVFAWMKRKAAGPITPWNFDEKVDRMESANRFIRRMTTKDTYLFGEDVLPAESMIYQKFVVLNELNNLKINGRHLSLKDKQDVYNDLFKQQKTVSIKALQNYYVTKKKAATAPTVGGLADPKKFLSSLSTYIDFKNMFGERVNDPQFQEDLEQIVEWSTIFEDRGIFKAKLQALGWLSEKQIQQLVAKRYKGWGRLSKKLLTGLKNAEGYSILDEMWRSTENFMQIQSRPEFAALIQQANEKQFEGNDPDNVWENIENILGDAYTSPQNKKAIRQVVKVVQDIEKAVGNPPEKIAIEFTREAAANPQRTQSRLRTLEKLYESAEEVVDAGLTAELAEFKENKHVLSDKYYLYFTQLGRDVYTGDTISLDKLNDYDVDHILPQSFIKDDSLDNRVLTIRAVNNGKSDNVPAKMFGKKMGSFWRHLLDNGMISKRKYNNLITDPDNISKYAQKGFINRQLVETSQVIKLTANILNGIYDKDTEIIEVPAKMNSQMRKMFDLVKVREVNDYHHAFDAYLTIFIGNYLYKCYPKLRPYFVYDNFKKFGNKEDIGHKRFNFLGKIEREKKVVAPETGEILWSNVAPNETIKQIKKVYNYKFMIVSREITTRRAELFNQTVYPKNYRGKLIPIKEDRPTDLYGGYSGNTDAYLAIVALEDKKKGKYFKVVGIPTRAAAKLEKLKQQDSQQYLQALHEVIAPQFTKSTKKGIKKTEFEIVLDKVHYRQLVQDGPVKMMLGSSTYKYNAKQLVLSEKAL

SEQ ID NO: 131 - protein, 1398 aa, Veillonella parvula
METQASNQLISSHLKGYPIKDYFVGLDIGTSSVGWAVTNKAYELLKFRSHKMWGSRLFDEGESAVARRGFRSMRRRLERRKLRLKLLEELFADAMAQVDPTFFMRLRESKYHYEDKTTGHSSKHILFIDKNYNDQDYFKEYPTVYHLRSELMKSGTDDIRKLFLAVHHILKYRGNFLYEGATFDSNASTLDDVIKQALENITFNCFDCNSAISSIGQILMEAGKTKSDKAKAIEHLVDTYIATDTVDTSSKTQKDQVKEDKKRLKAFANLVLGLNASLIDLFGSVEELEEDLKKLQITGDTYDDKRDELAKAWSDEIYIIDDCKSVYDAIILLSIKEPGLTISESKVKAFNKHKDDLAILKSLLKSDRSIYNTMFKVDEKGLHNYVHYIKQGRTEETSCNREDFYKYTKKIVEGLSDSKDKEYILSQIELQILLPLQRIKDNGVIPYQLHLEELKAILAKCGPKFPFLNEVADGFSVAEKLIKMLEFRIPYYVGPLNTHHNVDNGGFAWAVRKASGRVTPWNFDDKIDREKSAAAFIKNLTNKCTYLLGEDVLPKSSLLYSEFMLLNELNNVRIDGKPLEKVVKEHLIEAVFKQDHKKMTKNRIEQFLKDNGYISETHKHEITGLDGEIKNDLASYRDMVRILGDGFDRSMAEEIITDITIFGESKKMLRETLRKKFASCLDDEAIKKLTKLRYRDWGRLSQKLLNGIEGCDKAGDGTPETIIILMRNFSYNLMELLGDKFSFMERIQEINAKLTEGQIVNPHDIIDDLALSPAVKRAVWQALRIVDEVAHIKKALPARIFVEVTRSNKNEKKKKDSRQKRLSDLYAAIKKDDVLLNGLNNEIFGELKSSLAKYDDAALRSKKLYLYYTQMGRCAYTGEIIELSLLNTDNYDIDHIYPRSLTKDDSFDNLVLCKRTANAQKSDAYPISEEIQKTQKPFWTFLKQQGLISERKYERLTRITPLTADDLSGFIARQLVETNQSVKAATTLLRRLYPGVDVVFVKAENVTDFRHDNNFIKVRSLNHHHHAKDAYLNIVVGNVYHERFTRNFRAFFKKNGANRTYNLAKMFNYDVNCTNAKDGKAWDVKTSMDTVKKMMDSNDVRVTKRLLEQTGALADATIYKATVAGKAKDGAYIGMKTKSSVFADVSKYGGMTKIKNAYSIIVQYTGKKGEVIKEIVPLPIYLTNRNTTDQDLINYVASIIPQAKDISIIYGKLCINQLVKVNGFYYYLGGKTNSKFCIDNAIQVIVSNEWIPYLKVLEKFNNMRKDNKDLKANVVSTRALDNKHTIEVRIVEEKNIEFFDYLVSKLKMPIYQKMKGNKAAELSEKGYGLFKKMSLEEQSIHLIELLNLLTNQKTTFEVKPLGITASRSTVGSKISNQDEFKVINESITGLYSNEVTIV

SEQ ID NO: 132 - protein, 1485 aa, Prevotella bivia
MKNILGLDLGTNSIGWAKISIDDNGKYIKDSIKLGSRIIPMSQDVLSNFSKGVTLSQTSERTSFRGARRLRERTLLRRERLHRILHLLGFLPKHYEKAIGWDRNDNKTYGKFINHAEPKLAWCKDNNGKMRFLFMDSFHDMLSEFSEKHPELLANGKKIPLDWTIYYLRKKALYKAITKEELAWILLNFNQKRGYYQLRGEEDRDSEANKKEYLELKVIGVEATGEKKGNDIWYNIHLENGWIYRRSSKNPLNDWLGKVKSFIVTTDLDADGNPKKDKDGNIKRSFRAPSEGDWTLIKKRTESLLENSGQTVGQFIYNHILEEPSAKIRGNFIRTIERKYYKDELKAILEKQKEFHHELSSESLLTECAKELYKRNIAHQEVLLKKGIIHLLLNDILFYQRPLKIKKSLIDNCPYENYKYVDKKSGDIKVKSIKCIAKSNPFFQEFRLWQFVSNLRLYRKSDDKDVTSEHLVTTDDYANLFTYLNNRKDIKQSVLLKEYFKIKKVKTINGAEYPVRWNYIDDDNKTYPCNETRYDILHALSKTELKSEWLTPERTYRLWHLLYSIESKEETKKALNKLNLSDDFTEAFLTIKPFKKEYGSYSEKAIKKLLSLMRMGYLWSEDEAIKQVGAEIEKTIEGELPDYVLQRLEKSQHNYNKISDFSGLPLWLASYIIYGRHSEAKEIIHWDNPESMMAYIKDFRQHSMRNPIVEQCVLETLRTVHDIWKEIGHIDEIHIELGREMKSTSEQRKAITQNVLHNQNTNIRIKLLLQELKNDNNITGVRPYSPMQQEILRIYEEGALQGLTKEDKDYNDILKISQTAQPTSNELTRYKLWLEQKYRSPYTGKAISLSKLFTSAYQIEHVIPQSRYFDDSLSNKVICESEVNTLKKAMLGMEFIKTCGGQKVHCTLLGDVEIYNEEDYKAFVNEHYSNNRTKRNKLLMEDIPQEFINRQLNDSRYISKMVKQLLSAIVRGQEEVEATSKFVIPCTGGITDRLKKDWGLNDIWNNLVSPRFQRMNALTGSEYFGHWENKEGKRVFQTTMPIQLQQGFSKKRIDHRHHAMDALVIACASRNIISYLNNETAQDTERRRDLRQKLCDKGGSVRKPWDSFTQDTQYALKDIIVTFKNYVRIINKATNYYEHYKTDGKKGMISQKGDELWAIRKPMHKETVFGKVNLRRPKRVSLSKAIDSVDIICNRKLKKYIKARLNEGLQKKQILNIFKELNNVWEGIDVNKIDIWEMSNDKEPMVATRKQLDTSFDEKKIRSISDTGIQKILLNYLITKNNNPELAFTPEGIQEMNSNISEYNDHKKHQPIYKVRVTEPLGAKYPIGTMGNNPKKFVEAQAGTNLYFAIYEDKEGKRNYDTIPLNIAAERLNQQLSPVPETNENNTPLKFYLSPNDLVYVPSEEERHSGNNIQLDKNRIYKMVSSTSKRCFFIHHRVAISLVDKKEFSAQNKMERSIDNEQVMIKSVCWKLITDRLGNIIKVIK

SEQ ID NO: 133 - protein, 1218 aa, Prevotella buccalis
MNKRILGLDTGTNSLGWAVVDWDEHAQSYELIKYGDVIFQEGVKIEKGIESSKAAERSGYKAIRKQYFRRRLRKIQVLKVLVKYHLCPYLSDDDLRQWHLQKQYPKSDELMLWQRTSDEEGKNPYYDRHRCLHEKLDLTVEADRYTLGRALYHLTQRRGFLSNRLDTSADNKEDGVVKSGISQLSTEMEEAGCEYLGDYFYKLYHEQGNKVRIRQRYTDRKKHYQHEFDAICEKQELSSELIEDLQRAIFFQLPLKSQRHGVGRCTFERGKPRCADSHPDYEEFRMLCFVNNIQVKGPHDLELRPLTYEEREKIEHLFFRKSKPNFDFEDIAKELAGKKNYAWIHDKEERAYKFNYRMTQGVPGCPTTAQLKSIFGDDWKTGIAETYTLIQKKNGSKSLQEMVDDVWNVLYSFSSVEKLKEFAHHKLQLDEENAEKFAKIKLSHSFAALSLKAIRKFLPFLRKGMYYTHASFFANIPTIVGKEIWNNEQSRKYIMENVGELVFNYQPKHRDVQGTIEMLIKDFLANNFELPAGATDKLYHPSMIETYPHALRNEFGILQLGSPRTNAIRNPMAMRSLHVLRRVVNQLLKESIIDENTEVHVEYARELNDANKRRAIADRQKEQDKQHKKYGDEIRKLYKEETGKDIEPTQTDVLKFQLWEEQNHYCLYTGEQIGITDFIGSNPKFDIEHTIPQSVGGDSTQMNLTLCDNRFNREVKKAKLPTELANHEEILTRIEPWKNKYEQLVKERDKQRTFAGMDKAVKDIRIQKRHKLQMEIDYWRGKYERFTMTEVPEGFSRRQGTGIGLISRYAGLYLKSLFHQADSRNKSNVYVVKGVATAEFRKMWGLQSEYEKKCRDNHSHHCMDAITIACIGKREYDLMAEYYHMEETFRQGRGSKPKFSKPWATFTEDVLNIYKNLLVVHDTPNNMPKHTKKYVQTSKGKVLAQGDTARGSLHLDTYYGAIERDGEIRYVVRRPLSSFTNPKELENIVDETVKRTIKEAIADKNFKQAIAEPIYMNEDKGILIKKVRCFANSVKQPINIRQHRDLSKKEYKQQYHVMNENNYLLAIYEGLVKNKVVREFEIVSYIEAAKYYKRSQDRNIFSSIVPTHSTKYGLPLKTKLLMGQQVLMFEENPDEIQVDNTKDLVKRLYKVVGIEKDGRIKFKHHQEARKEGLTIYSTPYKNNDDYVPIFRQSIKNINILVDGIDFNIDILGKVTLKE

SEQ ID NO: 134 - protein, 1218 aa, Prevotella timonensis
MNKRILGLDTGTNSLGWAVVDWDEHAQSYELIKYGDVIFQEGVKIEKGIESSKAAERSGYKAIRKQYFRRRLRKIQVLKVLVKYHLCPYLSDDDLRQWHLQKQYPKSDELMLWQRTSDEEGKNPYYDRHRCLHEKLDLTVEADRYTLGRALYHLTQRRGFLSNRLDTSADNKEDGVVKSGISQLSTEMEEAGCEYLGDYFYKLYDAQGNKVRIRQRYTDRNKHYQHEFDAICEKQELSSELIEDLQRAIFFQLPLKSQRHGVGRCTFERGKPRCADSHPDYEEFRMLCFVNNIQVKGPHDLELRPLTYEEREKIEPLFFRKSKPNFDFEDIAKALAGKKNYAWIHDKEERAYKFNYRMTQGVPGCPTIAQLKSIFGDDWKTGIAETYTLIQKKNGSKSLQEMVDDVWNVLYSFSSVEKLKEFAHHKLQLDEESAEKFAKIKLSHSFAALSLKAIRKFLPFLRKGMYYTHASFFANIPTIVGKEIWNKEQNRKYIMENVGELVFNYQPKHREVQGTIEMLIKDFLANNFELPAGATDKLYHPSMIETYPNAQRNEFGILQLGSPRTNAIRNPMAMRSLHILRRVVNQLLKESIIDENTEVHVEYARELNDANKRRAIADRQKEQDKQHKKYGDEIRKLYKEETGKDIEPTQTDVLKFQLWEEQNHHCLYTGEQIGITDFIGSNPKFDIEHTIPQSVGGDSTQMNLTLCDNRFNREVKKAKLPTELANHEEILTRIEPWKNKYEQLVKERDKQRTFAGMDKAVKDIRIQKRHKLQMEIDYWRGKYERFTMTEVPEGFSRRQGTGIGLISRYAGLYLKSLFHQADSRNKSNVYVVKGVATAEFRKMWGLQSEYEKKCRDNHSHHCMDAITIACIGKREYDLMAEYYRMEETFKQGRGSKPKFSKPWATFTEDVLNIYKNLLVVHDTPNNMPKHTKKYVQTSIGKVLAQGDTARGSLHLDTYYGAIERDGEIRYVVRRPLSSFTKPEELENIVDETVKRTIKEAIADKNFKQAIAEPIYMNEEKGILIKKVRCFAKSVKQPINIRQHRDLSKKEYKQQYHVMNENNYLLAIYEGLVKNKVVREFEIVSYIEAAKYYKRSQDRNIFSSIVPTHSTKYGLPLKTKLLMGQLVLMFEENPDEIQVDNTKDLVKRLYKVVGIEKDGRIKFKYHQEARKEGLPIFSTPYKNNDDYAPIFRQSINNINILVDGIDFTIDILGKVTLKE

SEQ ID NO: 135 - protein, 1487 aa, Prevotella timonensis
MKNILGLDLGSNSVGWALVKVEENGNPIGSIKMGSRIIPMSQDILGSFEKGDTVSQTAQRTLYRGKRRLIERHVLRRERLCRVLHIMNFLPAHFDRLLGWDKTDNKTYGKFIDDSEPKLAWRQNKNEMGKMEFVFMDSFHEMLSDFAKHQPQLIANGKKVPLDWTIYYLRKKALTQLISKEELAWILLNFNKKRGYYQLRGEEEEEQPTKKEEYKVLKVISVDADEGQKGNGIWYNIHLEDGGIYKKKSDIPLYDWVGKTLQLIVVTTYEKDGKTPKIFDSGKQNPSYRLPKEDDWGLVKKRTESQLQSSGKTVGAFIYDNILSKPDDKIRGNLVRTIERKYYKKELIEILQQQAKYHDELHNQNLLESCAKELYAHNDVHYNEVIKSNMINLLVNDIIFYQRPLKSKKSLIANCKYESYEYVDKETGEIKEMPIKCIAKSNPYYQEFRLWQFIHNLRLSDVVTREDVTAQYLSTPQDYCNLFTYLNDRKEIKQDILLKDFFKIKKVQIDKEKVFPIEWNYIKDATKSYPCNETRYELLSALKRAGMDKQWLDDTPNMQYRLWHLLYSVEEKEESAKALRKLYDDDKFVTSFLKIKPFNKCYGAYSEKAIKRLLTLMRMGKAWNEQAIDAKTLKCIQQIITDNVDSKLKEKIDDSRYVLHHVSDFQGLPTYLASYVIYGRHSEVTDIQCWDSPEDLLKFIRDFKQHSLRNPIVEQVILETLRVVYDIWKAEKHIDEIHVEVAREMKLTAQQRNEANLRNLNNEATNLRIKYLLEELKNDTFIKDVRPLSPIHQEKMRIYEQAVLGNLNKQDKDYDDIIKISKKEHPTNAELIRYKLWLEQRYCSPYTGKAISLSKLFTTAYEIEHIIPQSRYFDNSFNNKVICEAEVNKAKGNMLGYEFIKKQGGQKIYCTQLGKAVTILKEEAYKQFVNEHYAHNKRKRDNLLAENIPESFSSRQLNDTRYITKTIMSLLSNVVRQQSEEEATAKNLLPSSGSVTDRLKNDWGLKDVWNTIVTPRFERLNKLSGTNDFGEMKEENGNRYFQTNVPLEYEKGFKKKRIDHRHHAMDALVIACTTRNMVNYISNANANSPKQREDLRQLLCDKNRIINKPWDTFTQDALKALNDIVVSFKNNVRIINRATNRYQRYDKNGKKIIFSQKGDDMWAIRKSMHKETVFGRVNLIRKEVLPIAKALDNISAICNAQLRAYVNDLVDKHFNKKQLVAHFKSLNYKWNRQDVSKVEVWISSDNKTPMVAVRKPLDTSFDKKKIASITDTGIQTILLNYLESKGGDASVAFAPEGIQEMNSNIELYNNGKAHKPIKNVRLSEPLGAKYQVGERGAKTKKYVEADKGTNLFFAIYEDEEGKRYYYSVPLREAIERQKQKLSPVPEYNEKGVALKFYLSPNDLVYVPTEEERTMGTCHIDKARIYKMVSSTGCSCYFVPSTFAKVIVDKVELQSLNKMEKAITDECIKEVCWKLKVDRLGNIINVIK

SEQ ID NO: 136 - protein, 1138 aa, Bifidobacterium dentium
MLCRCHRRYRIGIDVGLMSVGLAAIEVDETGFPIRILNIQSVIHDGGIDPQLGKKKSISRKAISGVARRTRRMRRRKVVRLRQLDATLESLGFPIVEPDSLDTWEIWLTRAKLASSYIQDDETRKEDVSIALRHIARHRGWRNPYSNVESLFVDVAPSEQYEELRRKAEEKLGTSLSGNPTSAEIVECILKRQVGEVQLRTRSRKGVNGNAVEKEGLLPTKLMQSDNAAEIRRIFKVQRIDDETGRKLLRAVFKACSPKGSVERRVGRDALAPGLPRALKASLAFQEYRIANVLTNLVISEDGTKRKLTIAEKQRVFGFLSSNETDDITWIDVAEKLGLERRQIQGVGCLTADGEERISSTPPRNITALHIHSAKPVIREKLVAWWKAASPTVRETMVELLSNTVDIDRVREDMDYSSAVAFIDSLGDEELTALDSVDLLSGRAAYSRQTLKQLTERMLNTDDDLHEARKAVFGVDDNWKPPVDAISTSVGNPAVDRVLKIVNRYLLACQKRWRNPQSVQIEHVRESFSSVAKAKETERVQGERARYRNDLRRELCEQEGLNKIRESDIRRWESVQRQNGTCLYCGSPITFRTCEMDHIVPRKGVGSTNTRVNLAAACAACNKLKSNTAFSVWARTEGAANRKVSQRDAIERVKTFIFNKSVPPREQRAFKQAVISRLRQAESDPAIDNRSIESVAWMADELHRRIEAYFNQDADVSGNTPATQVWVFQGRVTALARKASGIEGRIHFAGEWKKTRLDRRHHAVDAAVIAMMNHSAAQTLVERDSLRLSQWITRKPETWKNYPFSEGQKKTRFKEWLDCMNALLDLLNDALDSDRVPVTRCQRMSLGNSQAHAATIRKMKRVELFSPMDADLIRRASTPALYCALTRLPEYSPEKGLPENRGREIVLNGRHIRSTETVDFFASGAAQLMVRNGSAEIGDSIHHMRIYRYRKTGAKSQEYVYGMIRVFQIDLLHASSENLFAVQLPSQSVSVRYGDKNVVQAIQEGRAEYLGHIVPNDEILISYEGVRMKDSEKIGAYANDFSGTASELAQRRHWVVVGSDVSKLALRPSYLSEEGLENSGSESERLSKQTRKVIEGKGWVVAVNILAKYHPVVIRRNALGEPRFRTNSGMPVSWRWDR

SEQ ID NO: 137 - protein, 587 aa, Neisseria subflava
MATSRSRIRSQTDAFGVVGSLVAFNQTSRLFVAKKNEGETADKELGALLKGVADNAHALQTGNFRTPAELALNKFEKESGHIRNQRGDYSHTFNRKDLQAELNLLFEKQKEFGNPHVSDGLKEGIETLLMAQRPALSGDAVQKMLGYCTFEPTEPKAAKNTYTAGRFIWLTKLNNLRILEQGSERPLTTTERATLMDEPYRKSKLTYAQARKLLGLEDTAFFKGLRYGKDNAEASTLMEMKAYHAISRALEKEGLKDKKSPLNLSPELQDEIGTAFSLFKTDEDITGRLKDRVQPEILEALLKHISFDKFVQISLKALRRIVPLMEQGKRYDEACAEIYGDHYGKKNAEEKIYLPPIPADEIRNPVVLRALSQARKVINAVVRRYGSPARIHIETAREVGKSFKDRKEIEKRQEENRKDREKAAAKFREYFPNFVGEPKSKDILKLRLYEQQHGKCLYSGKEINLGRLNEKGYIEIDHALPFSRTWDDSFNNKVLVLGSENQNKGNQTPYEYFNGKDNSREWQEFKARVETSRFPRSKKQRILLQKFDEDGIYRIGVKTALSFPKYQIDELGKEIRPCRLKKRPPVR

SEQ ID NO: 138 - protein, 1269 aa, Mycoplasma gallisepticum
MNNSIKSKPEVTIGLDLGVGSVGWAIVDNETNIIHHLGSRLFSQAKTAEDRRSFRGVRRLIRRRKYKLKRFVNLIWKYNSYFGFKNKEDILNNYQEQQKLHNTVLNLKSEALNAKIDPKALSWILHDYLKNRGHFYEDNRDFNVYPTKELAKYFDKYGYYKGIIDSKEDNDNKLEEELTKYKFSNKHWLEEVKKVLSNQTGLPEKFKEEYESLFSYVRNYSEGPGSINSVSPYGIYHLDEKEGKVVQKYNNIWDKTIGKCNIFPDEYRAPKNSPIAMIFNEINELSTIRSYSIYLTGWFINQEFKKAYLNKLLDLLIKTNGEKPIDARQFKKLREETIAESIGKETLKDVENEEKLEKEDHKWKLKGLKLNTNGKIQYNDLSSLAKFVHKLKQHLKLDFLLEDQYATLDKINFLQSLFVYLGKHLRYSNRVDSANLKEFSDSNKLFERILQKQKDGLFKLFEQTDKDDEKILAQTHSLSTKAMLLAITRMTNLDNDEDNQKNNDKGWNFEAIKNFDQKFIDITKKNNNLSLKQNKRYLDDRFINDAILSPGVKRILREATKVFNAILKQFSEEYDVTKVVIELARELSEEKELENTKNYKKLIKKNGDKISEGLKALGISEDEIKDILKSPTKSYKFLLWLQQDHIDPYSLKEIAFDDIFTKTEKFEIDHIIPYSISFDDSSSNKLLVLAESNQAKSNQTPYEFISSGNAGIKWEDYEAYCRKFKDGDSSLLDSTQRSKKFAKMMKTDTSSKYDIGFLARNLNDTRYATIVFRDALEDYANNHLVEDKPMFKVVCINGSVTSFLRKNFDDSSYAKKDRDKNIHHAVDASIISIFSNETKTLFNQLTQFADYKLFKNTDGSWKKIDPKTGVVTEVTDENWKQIRVRNQVSEIAKVIEKYIQDSNIERKARYSRKIENKTNISLFNDTVYSAKKVGYEDQIKRKNLKTLDIHESAKENKNSKVKRQFVYRKLVNVSLLNNDKLADLFAEKEDILMYRANPWVINLAEQIFNEYTENKKIKSQNVFEKYMLDLTKEFPEKFSEFLVKSMLRNKTAIIYDDKKNIVHRIKRLKMLSSELKENKLSNVIIRSKNQSGTKLSYQDTINSLALMIMRSIDPTAKKQYIRVPLNTLNLHLGDHDFDLHNMDAYLKKPKFVKYLKANEIGDEYKPWRVLTSGTLLIHKKDKKLMYISSFQNLNDVIEIKNLIETEYKENDDSDSKKKKKANRFLMTLSTILNDYILLDAKDNFDILGLSKNRIDEILNSKLGLDKIVK

SEQ ID NO: 139 - protein, 1354 aa, Prevotella melaninogenica
MADFAKYQPGMVADGRKIPLDWTLYYLRKKALTQAIRKEELAWILLNFNQKRGYYQLRGEEEEENSTKHEEYYELKVVSVEAAEEGKGGNTWYNVTLENGWIYRRQSKIELNDWVGKVRPFIVTTEYEIDGVTIKKDKNGEVKRSFRAPSENDWGLRKKRTESLLEESGKTVGAFIYNHILSEPADKIRGNFIRTIERKFYKKELEAILREQSKHQKELKDIDTLIACIKELYPNNKPHQDSLIKKDMTYLLITDLIFYQRPLKSKKSLIADCPYEYYEYVIKETGENKRQSIKCIAKSNPYYQEFRLWQFIINLRLFDRNNDKEVTSEYLSSMEDYTRLFTYLNDRKDINQETLLKDFFKQKKVKRGMEKEFPIRWNYIEDKEKKYPCNETRHELLTALGKVGIDHSWLDDKELFYRLWHLLYSVESKEEAEGALRKLVDNDDFVNAFLKIKPFKKEYGAYSEKAIKKLLAVMRMGNLWNEVDICEQTRDRIQNIIKGDIDEKIKDRMGRTFSQLSDFQGLPEWLACYVVYGQHSEATDIQRWTKPENLMAYINGFKQHSLRNPIVEQCILETLRTVHDIWKEAGHIDEIHIELGRGMKSTADQRARMSKSIMQNENTNLRIKSLLMELKNAKEFENVRPYSPMQQEILRIYEEGALQELTKEDAQYNEISKISQMAQPSANELLKYRLWLEQKYCSPYTGKPISLSKLFTSAYQIEHIIPQSRYFDDSFTNKVICEAEVNQLKSNMLGYEFIKKHGGEIVRCTMIGDVKLLDAKEYYNFVTEHYTNNRRKKEKLLMEDIPQEFLNRQMNDSRYISKKVMAILSNIVREEDEQEAKSKFVIACSGGITDRLKQDWGLNDVWNSIVYPRFERLNKLTNTENFGRWENKKGKQVFQTSVPLELQKDFSKKRIDHRHHAMDALVIACASNNIINYLNNESAKSQEKREDLRKKLCDKNRIIRKPWETFTQDAHTALENVVVSFKNYIRVINKATNYYEKYDKNGKKEIAEQKGQDMWAIRKPMHKETVFGQVNLRRKITIKLKDALEKIPAICDKELRDYINILVAKQFNKKQILAHFKSINYRLNMKSVDKVDVWQFSNEKEPMVATRKSVDTSFDTKRIATITDTGIQKILLNYLKAKNNDPNIAFTPEGIAEMNKHITEYNNGKQHQPILKVRVSEPKGAKYQVGETGNKRSKFVEAQKGTNLYFAIYEDKEGNRSYNTIPLNEVIERLKQGLSPVPDANEKSIPLKFHLSPNDLVYVPKTDEENEIKMGQIYKFVDSSGTTANFVPHRVSNLIYNVDKKIAENFCNHEIIQNEYGIGSPQSKNQKSITGEMIKAVCWKLEVDRLGNIHKIIK

SEQ ID NO: 140 - protein, 1130 aa, Streptococcus gallolyticus
MTNGKILGLDIGIASVGVGIIEAKTGKVVHANSRLFSAANAENNAERRGFRGSRRLNRRKKHRVKRVRDLFEKYEIVTDFRNLNLNPYELRVKGLTEQLTNEELFAALRTISKRRGISYLDDAEDDSTGSTDYAKSIDENRRLLKTKTPGQIQLERLEKYGQLRGNFTVYDENGEAHRLINVFSTSDYEKEARKILETQADYNKKITAEFIDDYVEILTQKRKYYHGPGNEKSRTDYGRFRTDGTTLENIFGILIGKCSFYPDEYRASKASYTAQEYNFLNDLNNLKVPTETGKLSTEQKEALVEFAKSTATLGPAKLLKEIAKILDCKVDEIKGYREDDKGKPDLHTFEPYRKLKFNLDSVNIDDLSREVLDKLADILTLNTEREGIEDAIRHNLPNQFTEGQISEIIKVRKSQSTAFNKGWHSFSAKLMNELIPELYATSDEQMTILTRLEKFKVNKKSSKNTKTIDEKEVTDEIYNPVVAKSVRQTIKIINAAVKKYGDFDKIVIEMPRDKNADDEKKFIDKRNKENKKEKDDALKRAAYLYNGTDKLPDEVFHGNKQLETKIRLWYQQGERCLYSGKPIPIQELVHNSNNFEIDHILPLSLSFDDSLANKVLVYAWTNQEKGQKTPYQVIDSMDAAWSFREMKDYVLKQKGLGKKKRDYLLTTENIDKIEVKKKFIERNLVDTRYASRVVLNSLQSALRELGKDTKISVIRGQFTSQLRRKWKIDKSRETYHHHAVDALIIAASSQLKLWEKQDNPMFVDYGNNQVVDKQTGEILSVSDDEYKELVFQPPYQGFVNMISSKGFEDEILFSYQVDSKYNRKVSDATIYSTRKAKIGKDKKEETYVLGKIKDIYSQNGFDTFIKKYNKDKTQFLMYQKDPLTWENVIEVILRDYPTTKKSEDGKNDVKCNPFEEYRRENGLVCKYSKKGKGTPIKSLKYYDKKLGNCIDITPEGSKNEVVLQSLNPWRADVYFNPETLKYELLGLKYSDLSFEKGTGKYHISQEKYDVIKEKEGIGKKSEFKFTLYRNDLILIKDTASGEQEIYRFLSRTMPNVKHYAELKPYDKEKFDNVQELVEALGEADKVGRCIKGLNKSNLSIYKVRTDVLGNKYFVKKEGDKPKLDFKNNKK

SEQ ID NO: 141 - protein, 1371 aa, Streptococcus gallolyticus
MTEKNYSIGLDIGTNSVGWAVITDDYKVPAKKMKVLGNTDKKYIKKNLLGALLFDNGETAEATRLKRTARRRYTRRKNRLRYLQEIFAEEMAKVDESFFYRLDESFLTTDDKDFERHPIFGNKADEIKYHQEFPTIYHLRKHLADSHEKADLRLIYLALAHMIKFRGHFLIEGELNAENTDVQKLFEAFVEVYDRTFDDSNLSEITVDASSILTEKFSKSRRLENLIKHYPTEKKNTLFGNLVALALGLQPNFKTSFKLSEDAKLQFSKDTYEEDLEELIGKIGDEYADLFTSAKNLYDAILLSGILTVADNTTKAPLSASMIKRYNEHQVDLKKLKEFIKNNASDKYDEIFNDKDKNGYAGYIENGVKQDEFYKYLKTTLSKIDGSDYFLDKIEREDFLRKQRTFDNGSIPHQIHLQEMHAILRRQGEHYAFLKENQAKIEKILTFRIPYYVGPLARKNSRFAWAEYHSDEKITPWNFDEIIDKEKSAEKFITRMTLNDLYLPEEKVLPKHSLVYETYTVYNELTKVKYVNEQGKSNFFDANMKQEIFEHVFKENRKVTKDKFLNYLNKEFPEYRIQDLIGLDKENKSFNASLGTYHDLKKILDKSFLDDKTNETIIEDIIQTLTLFEDRDMIRQRLQKYSDIFTPQQLKKLERRHYTGWGRLSYKLINGIRNKENGKSILDYLIDDGYANRNFMQLISDDTLPFKQIIKDAQIIGDIDDVTSVVRELPGSPAIKKGILQSVKIVDELVKVMGHNPDNIVIEMARENQTTNRGRNQSQQRLKKLQDSLKELGSNILNEEKPSYIEGKVENNHLQDDRLFLYYIQNGKDMYTGDELDIDHLSDYDIDHIIPQAFIKDDSIDNRVLTSSAKNRGKSDDVPSLDIVHDRKADWIRLYKSGLISKRKFDNLTKAERGGLTENDKAGFIKRQLVETRQITKHVAQILDSRFNTERDENDKVIRNVKVITLKSNLVSQFRKDFKFYKVREINDYHHAHDAYLNAVVGTALLKKYPKLAPEFVYGEYKKYDIRKFITSSGDKATAKYFFYSNLMNFFKRVIRYSNGKVVVRPVIECSKDTGEIAWNKQTDFEKVRRVLSYPQVNIVKKVETQTGGFSKESILPKGNSDKLIPRKTKKFRWDTPKYGGFDSPNIAYSVFVIADVEKGKAKKLKTVKELVGISIMERSSFEENPVVFLEKKGYQNVQEDNLIKLPKYSLFEFEGGRRRLLASASELQKGNEVVLSRHLVELLYHAHRVNSFNNSEHLKYVSEHKKEFGEVLSCVENFAKSYVDVEKNLGKIRAVADKIDTFSIEDISISFVNLLTLTALGAPADFNFLGEKIPRKRYTSTKECLNATLIHQSITGLYETRIDLSKLGEE

SEQ ID NO: 142 - protein, 1168 aa, Azospirillum sp.
MARPAFRAPRREHVNGWTPDPHRISKPFFILVSWHLLSRVVIDSSSGCFPGTSRDHTDKFAEWECAVQPYRLSFDLGTNSIGWGLLNLDRQGKPREIRALGSRIFSDGRDPQDKASLAVARRLARQMRRRRDRYLTRRTRLMGALVRFGLMPADPAARKRLEVAVDPYLARERATRERLEPFEIGRALFHLNQRRGYKPVRTATKPDEEAGKVKEAVERLEAAIAAAGAPTLGAWFAWRKTRGETLRARLAGKGKEAAYPFYPARRMLEAEFDTLWAEQARHHPDLLTAEAREILRHRIFHQRPLKPPPVGRCTLYPDDGRAPRALPSAQRLRLFQELASLRVIHLDLSERPLTPAERDRIVAFVQGRPPKAGRKPGKVQKSVPFEKLRGLLELPPGTGFSLESDKRPELLGDETGARIAPAFGPGWTALPLEEQDALVELLLTEAEPERAIAALTARWALDEATAAKLAGATLPDFHGRYGRRAVAELLPVLERETRGDPDGRVRPIRLDEAVKLLRGGKDHSDFSREGALLDALPYYGAVLERHVAFGTGNPADPEEKRVGRVANPTVHIALNQLRHLVNAILARHGRPEEIVIELARDLKRSAEDRRREDKRQADNQKRNEERKRLILSLGERPTPRNLLKLRLWEEQGPVENRRCPYSGETISMRMLLSEQVDIDHILPFSVSLDDSAANKVVCLREANRIKRNRSPWEAFGHDSERWAGILARAEALPKNKRWRFAPDALEKLEGEGGLRARHLNDTRHLSRLAVEYLRCVCPKVRVSPGRLTALLRRRWGIDAILAEADGPPPEVPAETLDPSPAEKNRADHRHHALDAVVIGCIDRSMVQRVQLAAASAEREAAAREDNIRRVLEGFKEEPWDGFRAELERRARTIVVSHRPEHGIGGALHKETAYGPVDPPEEGFNLVVRKPIDGLSKDEINSVRDPRLRRALIDRLAIRRRDANDPATALAKAAEDLAAQPASRGIRRVRVLKKESNPIRVEHGGNPSGPRSGGPFHKLLLAGEVHHVDVALRADGRRWVGHWVTLFEAHGGRGADGAAAPPRLGDGERFLMRLHKGDCLKLEHKGRVRVMQVVKLEPSSNSVVVVEPHQVKTDRSKHVKISCDQLRARGARRVTVDPLGRVRVHAPGARVGIGGDAGRTAMEPAEDIS

SEQ ID NO: 143 - protein, 1345 aa, Streptococcus mutans
MKKPYSIGLDIGTNSVGWAVVTDDYKVPAKKMKVLGNTDKSHIKKNLLGALLFDSGNTAADRRLKRTARRRYTRRRNRILYLQEIFAEEMSKVDDSFFHRLEDSFLVTEDKRGERHPIFGNLEEEVKYHENFPTIYHLRQYLADNPEKVDLRLVYLALAHIIKFRGHFLIEGKFDTRNNDVQRLFQEFLAVYDNTFENSSLQEQNVQVEEILTDKISKSAKKDRVLKLFPNEKSNGRFAEFLKLIVGNQADFKKHFELEEKAPLQFSKDTYEEELEVLLAQIGDNYAELFLSAKKLYDSILLSGILTVTDVSTKAPLSASMIQRYNEHQMDLAQLKQFIRQKLSDKYNEVFSDVSKDGYAGYIDGKTNQEAFYKYLKGLLNKIEGSGYFLDKIEREDFLRKQRTFDNGSIPHQIHLQEMRAIIRRQAEFYPFLADNQDRIEKILTFRIPYYVGPLARGKSDFAWLSRKSADKITPWNFDEIVDKESSAEAFINRMTNYDLYLPNQKVLPKHSLLYEKFTVYNELTKVKYKTEQGKTAFFDANMKQEIFDGVFKVYRKVTKDKLMDFLEKEFDEFRIVDLTGLDKENKAFNASYGTYHDLRKILDKDFLDNSKNEKILEDIVLTLTLFEDREMIRKRLENYSDLLTKEQVKKLERRHYTGWGRLSAELIHGIRNKESRKTILDYLIDDGNSNRNFMQLINDDALSFKEEIAKAQVIGETDNLNQVVSDIAGSPAIKKGILQSLKIVDELVKIMGHQPENIVVEMARENQFTNQGRRNSQQRLKGLTDSIKEFGSQILKEHPVKHSQLQNDRLFLYYLQNGRDMYTGEELDIDYLSQYDIDHIIPQAFIKDNSIDNRVLTSSKENRGKSDDVPSKNVVRKMKSYWSKLLSAKLITQRKFDNLTKAERGGLTDDDKAGFIKRQLVETRQITKHVARILDERFHTETDENNKKIRQVKIVTLKSNLVSNFRKEFELYKVREINDYHHAHDAYLNAVIGKALLGVYPQLEPEFVYGDYPHFHGHKENKATAKKFFYSNIMNFFKKDDVRTDKNGEIIWKKDEHISNIKKVLSYPQVNIVKKVEEQTGGFSKESILPKGNSDKLIPRKTKKFYWDTKKYGGFDSPIVAYSILVIADIEKGKSKKLKTVKALVGVTIMEKMTFERDPVAFLERKGYRNVQEENIIKLPKYSLFKLENGRKRLLASARELQKGNEIVLPNHLGTLLYHAKNIHKVDEPKHLDYVDKHKDEFKELLDVVSNFSKKYTLAEGNLEKIKELYAQNNGEDLKELASSFINLLTFTAIGAPATFKFFDKNIDRKRYTSTTEILNATLIHQSITGLYETRIDLSKLGGD

SEQ ID NO: 144 - protein, 1024 aa, Helicobacter mustelae
MIRTLGIDIGIASIGWAVIEGEYTDKGLENKEIVASGVRVFTKAENPKNKESLALPRTLARSARRRNARKKGRIQQVKHYLSKALGLDLECFVQGEKLATLFQTSKDFLSPWELRERALYRVLDKEELARVILHIAKRRGYDDITYGVEDNDSGKIKKAIAENSKRIKEEQCKTIGEMMYKLYFQKSLNVRNKKESYNRCVGRSELREELKTIFQIQQELKSPWVNEELIYKLLGNPDAQSKQEREGLIFYQRPLKGFGDKIGKCSHIKKGENSPYRACKHAPSAEEFVALTKSINFLKNLTNRHGLCFSQEDMCVYLGKILQEAQKNEKGLTYSKLKLLLDLPSDFEFLGLDYSGKNPEKAVFLSLPSTFKLNKITQDRKTQDKIANILGANKDWEAILKELESLQLSKEQIQTIKDAKLNFSKHINLSLEALYHLLPLMREGKRYDEGVEILQERGIFSKPQPKNRQLLPPLSELAKEESYFDIPNPVLRRALSEFRKVVNALLEKYGGFHYFHIELTRDVCKAKSARMQLEKINKKNKSENDAASQLLEVLGLPNTYNNRLKCKLWKQQEEYCLYSGEKITIDHLKDQRALQIDHAFPLSRSLDDSQSNKVLCLTSSNQEKSNKTPYEWLGSDEKKWDMYVGRVYSSNFSPSKKRKLTQKNFKERNEEDFLARNLVDTGYIGRVTKEYIKHSLSFLPLPDGKKEHIRIISGSMTSTMRSFWGVQEKNRDHHLHHAQDAIIIACIEPSMIQKYTTYLKDKETHRLKSHQKAQILREGDHKLSLRWPMSNFKDKIQESIQNIIPSHHVSHKVTGELHQETVRTKEFYYQAFGGEEGVKKALKFGKIREINQGIVDNGAMVRVDIFKSKDKGKFYAVPIYTYDFAIGKLPNKAIVQGKKNGIIKDWLEMDENYEFCFSLFKNDCIKIQTKEMQEAVLAIYKSTNSAKATIELEHLSKYALKNEDEEKMFTDTDKEKNKTMTRESCGIQGLKVFQKVKLSVLGEVLEHKPRNRQNIALKTTPKHV

SEQ ID NO: 145 - protein, 765 aa, Butyrivibrio fibrisolvens
MGITIGLDLGVASVGWAVVNDDYEILESCSNIFPSADASKNSERRGFRQGRRLTRRRKNRIHDFQKLWEDKGFVIPSQGTEDVLAIKIKGLSEKLSVDEVYWVLLNSLKHRGISYLDDADSGDNSSDYAKSISRNEEELKEKLPCEIQWERLQKYGAYRGNISIVEDGEPITLRNVFTTSAYKKEVEQFIDTQAKYNAQYSGDFKADYLEIFNRKREYYEGPGNELSRTDYGKYTTEINADGEYITVDNIFDKLVGKCSVNPDERRAAGASYTAQEFNVLNDLNNLTISSESSFIEDGKLTEDAKRKIIETIKNAKTVNVKKIICDVIGDKKCQISGARIDKNEKEIFHSFEAYNKMRRALEEIGFDISSLSRENLDLIGDILTLNTDRESILNAFNRKGIELADEAKDILVKVRKTNGSLFNKWQSFGLSIMNELIPELYAQPKNQMELLTAMGVFKSRGDRFLECKEIPGDLIVDDIYNPVVSKTVRITVRILNALIKKYGYPDRVVIEMPRDKNSDEEQQRLKKEQRDNENEIKDIKARVKTEYGREITEEDFRQHSKLSLKLKLWNEQQGICPYSGKSIKIDDLLDNPNLFEVDHIIPLSISFDDSRNNKVLVYSSENQDKGNRTPLAYLASVNRQWDIHSFMDYVLKTYAGAQKRKKRDNLLNEQDITKVEVLQGFVNRNINDTRYASKVVLNSLQEYFSSKECSTKVKVIRGSFTHQMRVNLKLKKTVMNHMFIMQLMQCLLLFHRWDMTLIMNLQISI

SEQ ID NO: 146 - protein, 1338 aa, Coprococcus catus
MKQEYFLGLDMGTGSLGWAVTDSTYQVMRKHGKALWGTRLFESASTAEERRMFRTARRRLDRRNWRIQVLQEIFSEEISKVDPGFFLRMKESKYYPEDKRDAEGNCPELPYALFVDDNYTDKNYHKDYPTIYHLRKMLMETTEIPDIRLVYLVLHHMMKHRGHFLLSGDISQIKEFKSTFEQLIQNIQDEELEWHISLDDAAIQFVEHVLKDRNLTRSTKKSRLIKQLNAKSACEKAILNLLSGGTVKLSDIFNNKELDESERPKVSFADSGYDDYIGIVEAELAEQYYIIASAKAVYDWSVLVEILGNSVSISEAKIKVYQKHQADLKTLKKIVRQYMTKEDYKRVFVDTEEKLNNYSAYIGMTKKNGKKVDLKSKQCTQADFYDFLKKNVIKVIDHKEITQEIESEIEKENFLPKQVTKDNGVIPYQVHDYELKKILDNLGTRMPFIKENAEKIQQLFEFRIPYYVGPLNRVDDGKDGKFTWSVRKSDARIYPWNFTEVIDVEASAEKFIRRMTNKCTYLVGEDVLPKDSLVYSKFMVLNELNNLRLNGEKISVELKQRIYEELFCKYRKVTRKKLERYLVIEGIAKKGVEITGIDGDFKASLTAYHDFKERLTDVQLSQRAKEAIVLNVVLFGDDKKLLKQRLSKMYPNLTTGQLKGICSLSYQGWGRLSKTFLEEITVPAPGTGEVWNIMTALWQTNDNLMQLLSRNYGFTNEVEEFNTLKKETDLSYKTVDELYVSPAVKRQIWQTLKVVKEIQKVMGNAPKRVFVEMAREKQEGKRSDSRKKQLVELYRACKNEERDWITELNAQSDQQLRSDKLFLYYIQKGRCMYSGETIQLDELWDNTKYDIDHIYPQSKTMDDSLNNRVLVKKNYNAIKSDTYPLSLDIQKKMMSFWKMLQQQGFITKEKYVRLVRSDELSADELAGFIERQIVETRQSTKAVATILKEALPDTEIVYVKAGNVSNFRQTYELLKVREMNDLHHAKDAYLNIVVGNAYFVKFTKNAAWFIRNNPGRSYNLKRMFEFDIERSGEIAWKAGNKGSIVTVKKVMQKNNILVTRKAYEVKGGLFDQQIMKKGKGQVPIKGNDERLADIEKYGGYNKAAGTYFMLVKSLDKKGKEIRTIEFVPLYLKNQIEINHESAIQYLAQERGLNSPEILLSKIKIDTLFKVDGFKMWLSGRTGNQLIFKGANQLILSHQEAAILKGVVKYVNRKNENKDAKLSERDGMTEEKLLQLYDTFLDKLSNTVYSIRLSAQIKTLTEKRAKFIGLSNEDQCIVLNEILHMFQCQSGSANLKLIGGPGSAGILVMNNNITACKQISVINQSPTGIYEKEIDLIKL

SEQ ID NO: 147 - protein, 1035 aa, Candidatus Puniceispirillum
MRRLGLDLGTNSIGWCLLDLGDDGEPVSIFRTGARIFSDGRDPKSLGSLKATRREARLTRRRRDRFIQRQKNLINALVKYGLMPADEIQRQALAYKDPYPIRKKALDEAIDPYEMGRAIFHINQRRGFKSNRKSADNEAGVVKQSIADLEMKLGEAGARTIGEFLADRQATNDTVRARRLSGTNALYEFYPDRYMLEQEFDTLWAKQAAFNPSLYIEAARERLKEIVFFQRKLKPQEVGRCIFLSDEDRISKALPSFQRFRIYQELSNLAWIDHDGVAHRITASLALRDHLFDELEHKKKLTFKAMRAILRKQGVVDYPVGFNLESDNRDHLIGNLTSCIMRDAKKMIGSAWDRLDEEEQDSFILMLQDDQKGDDEVRSILTQQYGLSDDVAEDCLDVRLPDGHGSLSKKAIDRILPVLRDQGLIYYDAVKEAGLGEANLYDPYAALSDKLDYYGKALAGHVMGASGKFEDSDEKRYGTISNPTVHIALNQVRAVVNELIRLHGKPDEVVIEIGRDLPMGADGKRELERFQKEGRAKNERARDELKKLGHIDSRESRQKFQLWEQLAKEPVDRCCPFTGKMMSISDLFSDKVEIEHLLPFSLTLDDSMANKTVCFRQANRDKGNRAPFDAFGNSPAGYDWQEILGRSQNLPYAKRWRFLPDAMKRFEADGGFLERQLNDTRYISRYTTEYISTIIPKNKIWVVTGRLTSLLRGFWGLNSILRGHNTDDGTPAKKSRDDHRHHAIDAIVVGMTSRGLLQKVSKAARRSEDLDLTRLFEGRIDPWDGFRDEVKKHIDAIIVSHRPRKKSQGALHNDTAYGIVEHAENGASTVVHRVPITSLGKQSDIEKVRDPLIKSALLNETAGLSGKSFENAVQKWCADNSIKSLRIVETVSIIPITDKEGVAYKGYKGDGNAYMDIYQDPTSSKWKGEIVSRFDANQKGFIPSWQSQFPTARLIMRLRINDLLKLQDGEIEEIYRVQRLSGSKILMAPHTEANVDARDRDKNDTFKLTSKSPGKLQSASARKVHISPTGLIREG

SEQ ID NO: 148 - protein, 1270 aa, Mycoplasma gallisepticum
MNNSIKSKPEVTIGLDLGVGSVGWAIVDNETNIIHHLGSRLFSQAKTAEDRRSFRGVRRLIRRRKYKLKRFVNLIWKYNSYFGFKNKEDILNNYQEQQKLHNTVLNLKLEALNAKIDPKALSWILHDYLKNRGHFYEDNRDFNVYPTEELANYFDEFGYYKGIIDSKNDDDDKLEEGLTKYKFSNQHWLEEVKKVLSNQTGLPEKFKEEYESLFSYVRNYSEGPGSINSVSPYGIYHLDEKEGKVVQKYNNIWDKTIGKCSIFPDEYRAPKNSPIAMIFNEINELSTIRSYSIYLTGWFINQEFKKAYLNKLLDLLIKTNSEKPIDARQFKKLREETIAESIGKETLKDVESEEKLEKDDHKWKLKGLKLNTNGKIQYNDLSSLAKFVHKLKQHLKLDFLLEDQYTPLDKINFLQSLYVYLGKHLRYSNRVDSANLKEFSDSSRLFERVLQEQKDGLFKLFEQTDKDDEKILTQTHSLSTKAMLLAITRMTNLDNDEDNQKNNDKGWNFEAIKNFDQKFIDITKTNNNLSLKQDKRYLDDQFINDAILSPGVKRILREATKVFNAILKQFSEEYDVTKVVIELARELSEEKELENTKNYKKLIKKNGDKISEGLKALGIAEDKIEEILKSPTKSYKVLLWLQQDHIDPYSQKEIAFDDILTKTEKTEIDHIIPYSISFDDSSSNKLLVLAESNQAKSNQTPYEFINSGKAEITWEVYEAYCHKFKNGDSSLLDSTQRSKKFAKMMKTDTSSKYDIGFLARNLNDTRYATIVFRDALKDYANNHLVEDKPMFKVVCINGGVTSFLRKNFDPKSWYAKKDRDKNIHHAVDASIISIFSNETKTLFNQLTKFADYKLFKNTDGSWKKIDPKTGVVSEVTDENWKQIRVRNQVSEIAKVIDKYIQDSNIERKARYSRKIENKTNISLFNDTVYSAKKVGYEDQIKRKNLKTLDIHESAEENKNSKVKKQFVYRKLVNVSLLNNDKLADLFAEKEDILMYRANPWVINLAEQIFNEYTENKKIKSQNVFEKYMLDLTKEFPEKFSEAFVKSMIRNKTAIIYNVEKDVVHRIKRLKILSSELKENKWSNVIIRSKNESGTKLSYQDTINSIALMIMRSIDPTAKKQYIRVPLNTLNLHLGDQDFDLHNIDAYLKKPKFVKYLKANEIGDEYKPWRVLTSGTLLIHKKDKKLMYISSFQNLNDLIEIKNLIETEYKENVDSDPKKKKKASQILRSLSVILNDYILLDAKYNFDILGLSKNKIDEILNSKLDLDKIAK

SEQ ID NO: 149 - protein, 1204 aa, Prevotella ruminicola
MERILGIDTGTNSLGWAIVDKDENQYHLVAKGTNIFSEGVKIEKGIESSKAAERTEHRSVRKHYWRRKIRKIRLLTILSDNDLCPRLKHEQLRQWRLKKVYPTDDTFMEWQRTEDKAQVNPYKFRYICLTQKLDLSDITQRFILGRALYHLNQRRGFLSNRKEATKESEGTVKEGISSLSKDMKDSGCEYLGEYFYQLYQQGKKIRNHYTARKEHYLKEFKAICSKQELDDALIEKLEKAIFDQRPLKSQKGQVGTCTFEKGKSRCPSSHPLYEDFRMYSFINNIKVQVDTLYDKGERSLTDEEKQLIIPLFKRKSKRTFPFEDIAKKIAGKNNYCYIKSNEEKAYKFNYQMDTQVSGSPVNAQLEEIFGEDWLSSVCEVYTLANNKSRFQIMNDVWHVLFFYDDEDKLKEFAKDRLQLDDELAEKFSKISIPNDYAALSLKAIRKIMPYLRDYGLIYSEAVFLANLVDVLPQHVWGIKEMREAAIENVIDVMHSYDKNNIDGITLEGCVKTFLKERYQVSDDNLKKLYHPSMLDPYPRQRPNDEGVFQLGSPRISSVKNPMAMHSLFRLRKVVNLMLKKGYITPDTKVHIEFSRDLNDANKRWAIQTWQRENEKERERCRKEIEKYIASPSDTDILKYQLWEEQNHKCLYTGDEIRITDFLGDNPKYDIEHTIPRSAGGDSTKMNLTLCSSRFNRDEKKTKLPAELVNHDEILERISNWKEKYEDIDKQIRKISTKGATSKEDKDSKIRRRHYLILQRDYWRGKYQRFTMTEVPEGFSRRQGTDISVISRYARMYLKSVFKQVYIVKGIATSDFRKMWGIQDEYAKKERVNHVHHCIDAITIACIGKAEYDKLADYRHQYDDYLFQGKTKPTFDKPWPSFVIDIKHIQDELLIAHYAKDNLEKFTKKNLRGKDGRIIRDKFGNKLQMKGDTSRNSLHNDKFYGAINHEGEIKYVYRTNIEALDAKSIGNIVDPTVRSIIESAIAIHGSLKAAINKGIWMNEEKHIPIKKVRVFRNDVKKPIELKDQRDLSDKDYKQHYYVTNDGNYMMLIFSKLNNKGREIRQHVVINSLEATEVIKSHKRSQVGKVVWESYYSKEGFDLIYKLKSGTMILLYENNRDEVWDLDIRNLQKRLYIITKMKYDGRIYMMHHQEAREKKDLEEKSGSFKINEDYRPLIVNSYNQFNALVQDLDFEINDLGEIRRLI

SEQ ID NO: 150 - protein, 1178 aa, Scardovia inopinata
MGKRHNSNMAKKKISYRIGIDVGLNSTGLAAIEVDDDGAPIRILNTMSVIHDGGVDPDAAKVRGTRLAISGIARRTRRMRRRRAKRLDRLEQILEKYGYTDTEPVLEEPYGPWICRAELADGFINDDEQRRMMIGIAIRHIARHRGWRNPYQNVRALLNIDDSDLSEEYKNLKEKVQDQINDGKDLPNFTPSQLVRDYLDNFSGQPAARIRTGKAGPRGNRRDAVGILPQRMRQSDYAYELQRIFDMQKIGRDEAQELLMAVFEAKSPKGSAEKRIGKDPLTGKKRALKASLAFQKYRIVATITNLRIKTGTGSERMLSPTELNDIYTYLLRVQDDNHLPTWEDICEEVLHIGRYQLAGIGKTFEGGERISNMPPVIQTSLAIHGLSEGTLAEKLTKWWDKADDDSRESMIKLLSNTVDIDRVNEVDENFASALDFIDSLDDEELTKLDKIALPRGRAAYSEEALNKLTADMLNTGDDLFSARQRIYHVNNSWRPPQPPIGEPLGNPAVDRVLKITNRYLMNCLNRWGQPRRVTIEHTRSGFTSVKQATEHQKISDKRAEYRRDIVKQLEEAGVESVHEYDIRRWEAVQRQNGQCLYCGRDITFKTCEMDHIVPRKGPGSTNTRTNFAAVCPECNRMKSNIPFASWAETKEAKDRGVSLDKAIKQVRFFNFTKNEYSPQAQRNFKKSMIERLKQKTSDEPLDNRSIESVSWMADELYKRIDWYFNHEQYETSKKAINDDKDNLSGTQVVVYPGSITAEARNAAGLGGNIHFIGGRYKTRLDRRHHAVDACVIAMMEPGIARILTERNQLRQAQRLTARIEDDEVNWKDYPTENTAGYNKYQAWSDRMHALLEYMNNALDYDKIPVVRWERLQLGNRSAHEDTIHPLKKLPLSHEISAIDINHASTPALYEALVSLPDFSEQDGLPADPSRQINVNGERYSGDDLVSFFNSNAAQIAIQGGSAELGTAFHHARIYRCWTVGKNGKKKIFFGMIRVYQHDLLHAKNEDLFTYPLKRSSVSMRYAKKEVVHAILSGNAEYVGYLCVGDELVLDLKGDKSNDEGGSRLSGQVGEFVQKFEEDSKVNSQIVNRWTVDGFPDEAKLRLRPSMFAGEGLKNMKSELVENAAIKNILSKTGWRVSVDVISKKSPVVLRRNAFGEPRWKTNAGLPVSYRWQDTETKE

SEQ ID NO: 151 - protein, 1371 aa, Gordonibacter pamelaeae
MNLRNVESYQVGLDIGTGSVGWAVLDDNGDLCRFKGKPTWGSRVFPTAETAAEARVHRGQRRRYDRRRQRIDLLQRFFADEVAKVDPEFFIRLNQARLHPENRDPAHADYRWPLFNGSNFTEKDYYRQFPTIYHLRAHLLKSDEPADIRLVYLALHNIVKHRGNFLHQDNPSLSARNANVGDAVEALCLALDEWCGAHDVECACDEAALAEALGDASLRPGEKRERAEAALGVEKAHKKLAKAVSSAVVGYAAEFGHVFFAESEGSKFALSNDEKVEAYVCPDEGRDLFDAMRAVHSSYVLMGILSEAQGELLSVCKVGEYERYKRDLETLKSLVRAYGPERYDEFFCGPFYEGTRDYDPGKAQGYTKYNLGASKLSHEDFLKEVQKLLKDIGAQADERYADIERAIEAGAFLRRLKTSDNGTIPYQLHLEEMDAIIERQAAFYPFLAQEKDKLKSLVSFRIPYYVGPLTQKNAARDGKGEARFAWSSRKPGMEDARVYPWNWEDVIDKDQSAEDFIRRMTGTCTYLKGEPVLARCSLDYELFCVLNELAGARWTQDGDKSYRFDAADRLGIVEDLFKKRKRVTYEAAEKWLARTHGPESGKSAGGAYHVSGGQGEDAFESQLSSHYDFCKILGVDELSDADEAMAEDIILWNTVFEDRSILKRKIKLAYGDRLGDAQVRKLCQKRYTGWGRLSGELLRGLRSATDNGPKTIMDILLEGDPNHARRMGAAMNLMEILHDDLLEFQAKIDEHNRERALAVGGMSVDEVTGSPALRRGINQALRVVDEIAGIAGKPPAHIYVEVTRDEGARNKGRRTTSRYRALEAALSSIKAQCADVYAELKERDPRALDDERLTLYFMQCGKCMYSGDALDINKLQTYQVDHILPQSYVKDDSFENKVLVRPDTNQRKGDTLLLDERLIARMRGFWRTLRDAELIGEKKFNNLTRTSVSDEQMKKFVSRQLVETGQMVKQVQQLLQARYPESEVQPVKAGVSHQLRVGCALAKSREINDFHHAHDAYLACQVGRFVQYRHSAVYSEPVKMAAVVKQFIKKQAEDYRRTRELPGSDGFIVSSFMTPGFDVKTGEVFRDAWDAGAEIDRIRRCFDYKDCFISRMPEETHGAFWDATIYSPRAAGKTLSLPLKRGLDPRKYGSYSREQFAYFFVYEAVKPKKKQRVLEFAPVPVRVASALANDPDALEDYARELAEAEGLVFERIRRRKVYKYQQIIVGDSRLYVTGREEVRNARQLAFSQDETKLICRIEQGEECEEGELLDLFRSMQRKYLACAPRLARLMKVAEMEEGFIAATASGKREVLLSLTSIAAAHRNSIDLKPIGRKGSSGQMKITFSKELSTNGILFVDSSVTGMFERRCRLGL

SEQ ID NO: 152 - protein, 1388 aa, Zunongwangia profunda
MKRILGLDLGTNSIGWALVNEAENEKEISKIIKLGVRVNPLTIDEKTNFEKGRPLSTNADRTLKRGARRNLQRYKLRRENLIEILIDNHIITKETPLTEIGKGTTYQTLSLRAKAVRERIDLEDFAKVLLAINKKRGYKSSRKASNDEEGQAIDGMAIAKELYERGITPGQYVLELLENDRKYIPDFYRSDLKQEFNKIWNNQKTFYPEILTDELFKELDGKNKSQTWAICQKPFNIKGIKRITKGREKTIENYHWRVKGLSGKLNLEKLAIILQEINNDINQSSGYLGGISDKSKKLYLNKETVGEFLYKQIAKNPHTSLKNQVFYRHDYLDEFEQIWKTQSNFNANLTDELKQEIRDVIIFYQRKIKSQKSLISFCQFESWEQEYFDKETGKTKTRTVGRRVIPKSSPLFQEFKIWQNLNHLVFTNSETDEKIEIKEVEQEIRKELFEELNLRGDLNPNDLLKILRSQFKIGKLSNWKCNFEKIEGNRTNAALFNIYQKISDFEGYGIDWNKSNAKKIRKELKATFPEIGIDASILEFDAYKKQLTNQSSYELWHLLYSAEEDFKISEQDKLIYGNSSVSLKKKLHLKFGFNPEYAKMLANLSLMSDYGNLSAKAIKKILPYLEDGHLYSEACRLAGYNHSKSLTAEELEKFEPKAKLDLLKKNSLRNPVVEKILNQMVNVVNQVIDTYGKPDGVRIELARELKKSAKERAEMTKGIADGTRRNEEIKKIITQKFGIPNPTKSDLVRYRLWQELESRGYKDIFTDKYISPDKIFSSEIDIEHIIPKALLFDDSFSNKTLSFRNVNLKKANRTALDFITQDYQSNVEAYKERVETWNKDNHISKGKRNKLLMSLKDIPDGFIERDLRNSQYIARKAKRMLYEVFPNEVLATSGSITDKLRSDWDLINVMKELNLPKYKALGLTEYEERLDKGTEELFKHEVIKDWTKRNDHRHHAMDALAVAFTTHNHIQYINNLNARKDITQDNHPIIKNIENLITEVNSKGKRVFKAPMSSFRESAKEQIEAILVSFKNKNKVVTKNINQTKKEGGFNYQNAKTPRGQLHKETIYGKSKQPLEKPVKINNRFCKKQVGLIINFKEQEAVLHHLKKYDNNEKIAFSNKTLKSDPIQVNGSPLREVKIFEEIFTIRKDINPDNFKTQKHLDKIIDKGIKEVMKKRLEEYNGDFKTAFSDLDKNPIWLNQSKGITIKRATISGVTNAEPLHQAKDHLGNIILDDNGKEIPIDYVSTGNNHHVAIYQDESGNLQEEVVSFYEAVIRKNQDQPIIKKRHPKGWKFLFTMKQNEMFVFSSENFNPSEIDLLDEKNAAIISPNLFRVQKIATKNYMFRHHLETEVTNNLDFTYRHFQATEWLRNLCKVRIDHIGRIVQIGEY

SEQ ID NO: 153 - protein, 1082 aa, Methylosinus trichosporium
MRVLGLDAGIASLGWALIEIEESNRGELSQGTIIGAGTWMFDAPEEKTQAGAKLKSEQRRTFRGQRRVVRRRRQRMNEVRRILHSHGLLPSSDRDALKQPGLDPWRIRAEALDRLLGPVELAVALGHIARHRGFKSNSKGAKTNDPADDTSKMKRAVNETREKLARFGSAAKMLVEDESFVLRQTPTKNGASEIVRRFRNREGDYSRSLLRDDLAAEMRALFTAQARFQSAIATADLQTAFTKAAFFQRPLQDSEKLVGPCPFEVDEKRAPKRGYSFELFRFLSRLNHVTLRDGKQERTLTRDELALAAADFGAAAKVSFTALRKKLKLPETTVFVGVKADEESKLDVVARSGKAAEGTARLRSVIVDALGELAWGALLCSPEKLDKIAEVISFRSDIGRISEGLAQAGCNAPLVDALTAAASDGRFDPFTGAGHISSKAARNILSGLRQGMTYDKACCAADYDHTASRERGAFDVGGHGREALKRILQEERISRELVGSPTARKALIESIKQVKAIVERYGVPDRIHVELARDVGKSIEEREEITRGIEKRNRQKDKLRGLFEKEVGRPPQDGARGKEELLRFELWSEQMGRCLYTDDYISPSQLVATDDAVQVDHILPWSRFADDSYANKTLCMAKANQDKKGRTPYEWFKAEKTDTEWDAFIVRVEALADMKGFKKRNYKLRNAEEAAAKFRNRNLNDTRWACRLLAEALKQLYPKGEKDKDGKERRRVFSRPGALTDRLRRAWGLQWMKKSTKGDRIPDDRHHALDAIVIAATTESLLQRATREVQEIEDKGLHYDLVKNVTPPWPGFREQAVEAVEKVFVARAERRRARGKAHDATIRHIAVREGEQRVYERRKVAELKLADLDRVKDAERNARLIEKLRNWIEAGSPKDDPPLSPKGDPIFKVRLVTKSKVNIALDTGNPKRPGTVDRGEMARVDVFRKASKKGKYEYYLVPIYPHDIATMKTPPIRAVQAYKPEDEWPEMDSSYEFCWSLVPMTYLQVISSKGEIFEGYYRGMNRSVGAIQLSAHSNSSDVVQGIGARTLTEFKKFNVDRFGRKHEVERELRTWRGETWRGKAYI

SEQ ID NO: 154 - protein, 1186 aa, Gardnerella vaginalis
MEGNISYAIGIDVGLNSVGLAAIRLDNNGEPIRILKAMSVIHDAGIDPNGAKESDTRKAISGVARRVRRLYRQRRRRLQKLDFLLHSLGFPVVENKDLDFSDSFTPWIFRAKLADEYIADEKQRKQMLSVAIRHIARHRGWRNPYQSIKSMTQETEYSEFYNELLKNIEKFAPGVSCEGSTPAQLVRDYLLSQQGKASRRLRITTDDRRKNHPNSLDPVLPRKLMQSDNMLEILNIFNVQHIDNKYVREQIINAVFYAKSPRGSAENRVGKDAITGKGKRALKASLAFQKYRIISTISNLRIRENSKERCLTIEEKQSVYKLLTTSTDEYSKEKSAEAPLYTWIDVADCLGIERYKLRGVGSQIEDGESVGNRPPMLNSELAILYANAKSLKQSLITWWLAANRTQEDKEAFIEILSNTVDIEAIHDNPEYQDKYGSVIAFIDSMDETEIAALENISLPNGRAAYSLETLDKLNKQMLETDDDLFEARKKLFNLPNNWRPSEAPIAEPTGNPSVDRVLKIVHRFLISAKNRWGNPERINIEHVRSGFQSKKMANSYKKLLDKRTEGKENLKAMMRNSLHLGTSDSISDADIRRYEAVQRQNGQCLYCGSEITYHTCELDHIVPRKGPGSTNTRENLVATCSSCNAQKCNTPFATWCEESTYCKNHDISVDSAINRVRAFIFPPNSYDKRGASQFKKEVIARLKQKVGDEAFDNRSIESVAWMANELHRRIDWYYNSQNYQTNNGISDITNKAQTNVGVYAGSLTAIARRMSGIDGKLEFFDGRRKTRFDRRHHAVDASVIAMMTPGIAQILAIKCNLRETQLLQGNKVVPGGIDWKEYPTANDQGYQQYANWSVRMNALLELLNEEMRADRIAVVNSIRLRYSNSSVHKDDVHALLKLHVGDEIDSETIRRASTPALYCALTRNPDYDVNNGLPENTDRTILLHDKKLNADDSITFFKSKAAQLFVREGSVEIGNSIHHLRIYEYFEKLKSGKVKKSYGMIRVFQDDLHRYIHEDLFSCDLPEQSISMRYADTKVAHAVQTGNANYLGYLVPGDEIIVDFSHVKLSGYIGEFVEFLNKIGANCAAYKHWVVAGTDDKTTLILKPSMISSEGIDKLYSNCERNNFDYASYEKSIDKILVDKGWRVSVNVLDQYKAATIRRNALGEPRWASRSHLPISWSWDTGENRE

SEQ ID NO: 155 - protein, 1434 aa, Bacteroidetes oral
MKNILGLDLGTNSIGWAYVKQAQNDSEKSEIAELGVRVNPLTVDEKTNFEKGKPISTNADRTLKRGARRNLQRYKLRRQELIELLKDYQVISDKTILAEDGKETTFETLRLRVKSAKEQVSLEELARILLMINKKRGYKSSRKAKNEDEGQLIDGMEIARRLYDENLTTGQLSLQLLKEGKKSLPDYYRSDLQHELDKVWNFQKQFHPDILTDEFYTSIQGKGQKATRESFSSKYGIDTAENKGSREEKKLQAYQWRADATHKELTKEELAFVITEINNNINNSSGYLGAISDRSKELIFANETVGEYLWKQIQNDPHTSLKNQVFYRQDYFDEFERIWETQSGFYPQILTESLKNELRDILIFYQRKLKSQKALVSICEFESKEIPLKDKQGNPISKNGIPVTKLVGPKVAPKSSPLFQEFKIWQNLNNVLVRPKGSRKRKVTTNQQSTLLEGQEPVFELNLEQKELLFEELNLKGNLKTDYCLELIGYSAKEWEMNYPTLEGNKTNKALYEAYLKIIDSEGYDAKKLLKVKTDKDDINLDDIKVSASEIKTMISDIFNELGINTKILDFDAELERKQFEAQASYRLWHLLYSYEGDDSKSGNELLYRLLEDKFGFKREHSKTLANVSLLSDYGNLSTKAIRTIYPYIKENKFSTACELAGYRHSKLSISKEENENRTLKDTLDVLKKNSLRQPVVEKILNQMINLINELIEKHSEKDEKGNIVKYFKFDEIHIELARELKKNAEERRELDSKVREGKDRNEKIITILKSEFGLPYPTKNDITRYRLYEELKDNGYKDLYTNTYIPREKLFSKEIDIEHIIPKSRLFNDSFSNKTICYRQDNLNKGERTAYDYIEGLGKTQLDEYLNRVENLYTNKFITKAKYRNLLKKESEIGDGFIERDLRETQYIAKKAKEMLLQITRHVVSTTGSITDRLRDDWELVNVMRELNLPKYKVLGLTEIQERKNGQTVEVITDWTKRNDHRHHAMDALTVAFTKHSHIQYLNFLNARKDEKHKEYSNIMGIQQLETEKTTDKDGKDRRVFKTPIPNFRQVAKEHLESILISHKTKNKVVTRATNKIAGSKKQQETLSPRGQLHKETVYGKYRRYVQKEEKIGSKFDLQTIERVANPLYKRLLTKRLEENGGDPKKAFTGKNALAKSPIYLDETQTQQLPEKVKLVWLETDFSIRKDITPDNFKDEKSIDKVLDEGIKRILKDRLKSFDGDAKRAFTDLEQNPIWLNKEKGIAIKRVTISGVSNAEPLHTKKDHLGNEIFDDTGKPIPVDYVSTGNNHHIAIYRDENGNLQEKAVSFFEAVTRANQGLPTVDKTYNQHLGWQFLFTMKQNEMFVFPNKETGFDPQEIDLLDPKNKKLISPNLFRVQKISTKNYFFRHHLETSVETHNALNGVTYKSQLGLNGITDIIKVRINHLGDIVHIGEY

SEQ ID NO: 156 - protein, 1341 aa, Peptoniphilus sp.
MWGSRLFEEASTAQDRREHRSNRRRLERRKYRLDLLEELFVEEINKIDPEFFIRLRESKFHFEDRSLKNTFILFNDKMEGGYNDKVFFSKYPTIYHLRSALINGNKEDVRAVFLAIHNILKNRGHFLLAGNDINISLSLNDTLTDLFEYLKIHLGIEVEFENKLKDIEKIALDKNLSKSDKQKKIVQLLETDYKKQLADVFKLSLGLTANMENIFGKENEQGLEFINAENKIKKIQFDSSYEENIAEFDQFYGEYFEIIDICKKIYDAISLSQILVDGKGLSESKVLSYEKHKEDLKLLKKVLKNIDKAYDNKGEDRLVYKVLKEDKDKGTNYVNYSKLSNNGTATTKEEFYKFLSKNLDLKKFGKLNKEDIETLDYINSEILLGRFLPLQKEKINGVIPYQLQMKELTQILNNASKYLPFLNKIEDGMTVKDKIISLIKFRIPYYVGPLNEYNRIENGNGFAWIEKKKNEKIFPWNFNDVVDIEKSAEKFINNLTNKCTYIKEETVLPKNSIIYSKFMVLNELNNLQYGNKKLDIELKMKMYTDLFLEKKDNRKVTEKRILEYFRINGINDGKEKLTGLNNEIHADMKSYRDMCEIMGENFNINVAENIINWITVFHGEKKILINKIKNVYGKMFNDEQISKLSKLNYSDWGRLSKKLLTDIKCYIDADGINFPVSILEAMEVSNKNLMELLSNKYEFISCIDDINNKYFGDRDISASELIDELYVSPAVKRGIWQSVRILEEIVSIIGHNPKKIFIEMTRHNEEKVQKSSRRHNLEELYKAIRKDPEYVELIKEFDSTTDTDSFKIKKLYLYFMQLGKCAYSKEKIDFDKLFTDSYDIDHIYPRSKTKDDSIHNNLVLVKAKYNREKTDVYPIDINIQKNMNSFWNFLYTKKFITEEKYKRLIRTSDLTDEELAKFISRQLVETSQSTKATAEVLKQIYGDSDICYVKAENVSDFRYGSSRQKDKNDIQKLFVKCREVNHFHHAKDAYLNIVVGNVYDVKFTKNPVNFIKKNKMGNKSNYSLNHMFCFDVERNGYKAWDSSETIKTVGRMMKSNDVRITKHVHPTRGELYDATIYKAKIAKTGSYMPLKSSKNTPLSDVTKYGGYTKIKIAYYSVYKYKFSDKNLIKTEIRLIPIPIYLSKNDDDIKEYVKNYLNDRVNSKLIDFTKIYDKLYVNSLIKINGYLYYLGGKTNDRVWIDNAVSIVLDDKIEYLIKRISNDIKYGYEINVSDDELMDIYESLAEKANKKIFYNRLSDFEKIFSNMDVKKKFVKLEKNDKCRVLLQLLNVLTDSQTTYKLEMVGLKHSRSNIGMKISNLEEFKVINSSITGLYSNEIDILNI

SEQ ID NO: 157 - protein, 1391 aa, Lactobacillus gasseri
MTKIKNEYIVGLDVGTNSCGWVAMDFQNTILRMHGKTAIGSHLFDAGNSAADRRAFRTTRRRIKRRKWRLKLLEEIFDPYMTEVDPYFFARLKESGLSPLDKRKNVSSIVFPTALEDKKFYCNYPTIYHLRYDLMSEDKKFDLREIYLAIHHIVKYRGNFLYNTPVKDFEASKIDVKDSLEKLNELYERLDSEFTVELDSSNALEIEKIIRDKKVFKINKVKSIHQLLSLKTENKERTKLIKDVSKQIINAILGYKTKFETILLKNISKDEADDWEFKLTDVDADNKFENLIGDLNENEQEILLEIRNLANAITLSNIVEEGKTLSESMIDKYNKHSDDLELLKQVISDHPDRDKAKKLALAYDLYVNNRHGKLLQAKDVLGSKKTLSKEDFYKEVKKNLDDSKASQEILDTIALDSFMPKQRTNENGVIPYQLHQLELDRIIKNQGKYYPFLKEVNPVSSHLKEAPYKLDELIRFRVPYYVGPLISPNESTKNKQTKKNQNFAWMIRKEQGQITPWNFDQKVDRMASANKFIKRMTTKDTYLLGEDVLPANSLLYQKFTVLNELNNIKINGKRISVPLKEELYNNLFKKNSTVTTNKLKSYLKENYNLINVEIKGLADEKKFNSGLTTYNKLRNLKIFDQQLDDLNYDKDFERIIEWSTIFEDKAIYKDKLKTIKWLSDRQIDKLSKIRMQGWGQLSKKLLSQLTDNNGQTIIEQLWDSQNNFMQIVNQSDFKDAIAVANQNLLVNTSVEDILNEAYTSPANKKAIRQVVKVVDDIVKAASGKVPKQIAIEFTRDADDKAKISQTRANKLRKVYKELSNELASETIRNELERVAKDQKLLKDKYYLYFMQLGRDAYTGEPINIDDLGQYDIDHILPQSFIKDDSLENRVLVKKAVNNGKSDNVPVKLYGNRMAADLGMTIRHMWEKWKDQGLITKTKYNNLIIDPDKINKYESSGFIHRQLVETSQIIKLVSTILQSKYPDTEIIVVKARYNHYLRKHLNLYKSREVNDYHHAIDAYLSAICGNLLYQVYPYLRPFFVYGQYKKFSSDPKKEKIIYDKTRKYNFISQIFENKSNDIISLETKKKVFDKKDIIEKLKHAYNYKYMLVSRETETHDQEMFKMTVYPRLSRDTKKSRNLISKKKDMPTEIYGGYTNNSDAYMVIARINKKKGTEYRVFGVPMRELVNLRKAEKNGRYNAYLKQVLEPEIMYSKNGKKNKTISSFEIVKAKVPYKQVILDGDKKFMLASSTYVQNAKQLTLSQNSMQAITDNCENDTEEEKALEEKALIEAYDEILTNIDKYLPLFDINKFREKLHAGREKFINLSLDVKKDTILQVLNGLHDNAVMPKIKSLGLSTPLGFMQFSSGVPLSENAKLIYQSPTGLFEKRVKISDL

SEQ ID NO: 158 - protein, 1426 aa, Sphingobacterium spiritivorum
MKHILGLDLGTNSIGWALIKQDFENKQGEILGMGSRIIPMSQDILGDFGKGNSVSQTAERTKYRSVRRLRERFLLRRERLHRILNVLGFLPEHYASQIDFTKRFGKFKEETEPKLVYSNEGFIFKKSFEEMLSDFKTHQPQLLEDNKKIPYDWTIYYLRKKALSRKIEKEELAWILLNFNQKRGYYQLRGEEEEENPNKLIEFYSLKIVDVLADEPQKGKSDIWYSLILENGWIYRRSSKTPLFDWKEKTRDFIVTIDLNDDGSVKTDKEGNEKRSFRAPGENDWTLVKKKTEQEIDSSRKTVGTYIYETLLKNPKQKIKGKLVRTIERKFYKTELKQILEKQKEFHPELRQDDLYSDCVRELYKNNEAHQLTLSKKDFVHLFMEDIIFYQRPLGSQKSSISNCTLEFRKYKDENGTEHTQYLKAIPKSNPYYQEFRIWQWMYNLNIYKKEDDTNVTKDFLNTKADFESLFEFLNNRKEVDQKALLKHFKLNDKTHRWNYVEDKKYPCNETKTMILSRLDKVENISDDFLTREMEQKIWHIIYSVNDKVEYEKALKSFAGKNNLEDNSFFEAFKKFPPFKSEYGAFSEKAIKKLLPLMRMGKFWNYNNISEQSKSRIQKIITGEYDENIKDKVREKAIHLTTETDFQGLQLWLVQYIVYGRHSEAAMLGKWNSADDLEEFLKEFKQHSLRNPIVEQVITETLRVVKDIWQKYGNGAKDFFREIHIELGREMKLPAEERERLTRQISENENTNFRIKALLAEMMDDNSVENVRPFSPMQQEILKIYEEGVLNSDIEIEDDILKISKTAQPSSSDLKRYKLWLEQKYKSPYTGQIIPLNKLFTPEYEIEHIIPQSRYFDDSFTNKIICESAVNKLKDNYIGLEFIKKLGGSIVECGNGKSVAILKHDAYEDFIKKHYANNRSKRNKLLLEDIPEKMIERQMNDTRYISKYISGVLSNIVRVEDGTDEGVNSKNIVPGNGKITTQLKQDWGLNDVWNDLILPRFERMNHLTNSTDFTAWNENHQKFLPTVPVEFSKGFSKKRIDHRHHALDALVIACATKDHVNLLNNQSAKSDTKRYDLKKKLMKFEKVAYNHPQTGERIEREAPKQFLKPWETFTIDAKNHLETIIVSFKQNLRVINKATNYYEKYVEKEGTKVKERVEQKGTNWAIRKPMHKETVSGKIDLPRIKVPKGKILTATRKSLDTSFNLKTIGSITDTGIQKILKNYLQYKDNNPELAFSPEGIEDMNKNIEKFNNGKAHQSISKVRVFELGSKFPLGQSGNKKEKYVEAAKGTNLFFAIYQDKNGKRSYETIPLNEVIERQKQGLSVVDLKGVDDFYLSPNDLVYVPSEDELENISMIDFNKMSSERIYKVVSFTGNQIFFVRQDIATSVVNKAEFSTLNKMERAIDGTMIKETCVKLQIDRLGNISKI

SEQ ID NO: 159 - protein, 1361 aa, Lactobacillus casei; identical to SEQ ID NO: 75

SEQ ID NO: 160 - protein, 1436 aa, Bacteroides fragilis
MKRILGLDLGTNSIGWALVNEAENKDERSSIVKLGVRVNPLTVDELTNFEKGKSITTNADRTLKRGMRRNLQRYKLRRETLTEVLKEHKLITEDTILSENGNRTTFETYRLRAKAVTEEISLEEFARVLLMINKKRGYKSSRKAKGVEEGTLIDGMDIARELYNNNLTPGELCLQLLDAGKKFLPDFYRSDLQNELDRIWEKQKEYYPEILTDVLKEELRGKKRDAVWAICAKYFVWKENYTEWNKEKGKTEQQEREHKLEGIYSKRKRDEAKRENLQWRVNGLKEKLSLEQLVIVFQEMNTQINNSSGYLGAISDRSKELYFNKQTVGQYQMEMLDKNPNASLRNMVFYRQDYLDEFNMLWEKQAVYHKELTEELKKEIRDIIIFYQRRLKSQKGLIGFCEFESRQIEVDIDGKKKIKTVGNRVISRSSPLFQEFKIWQILNNIEVTVVGKKRKRRKLKENYSALFEELNDAEQLELNGSRRLCQEEKELLAQELFIRDKMTKSEVLKLLFDNPQELDLNFKTIDGNKTGYALFQAYSKMIEMSGHEPVDFKKPVEKVVEYIKAVFDLLNWNTDILGFNSNEELDNQSYYKLWHLLYSFEGDNTPTGNGRLIQKMTELYGFEKEYATILANVSFQDDYGSLSAKAIHKILPHLKEGNRYDVACVYAGYRHSESSLTREEIANKVLKDRLMLLPKNSLHNPVVEKILNQMVNVINVIIDIYGKPDEIRVELARELKKNAKEREELTKSIAQTTKAHEEYKTLLQTEFGLTNVSRTDILRYKLYKELESCGYKTLYSNTYISREKLFSKEFDIEHIIPQARLFDDSFSNKTLEARSVNIEKGNKTAYDFVKEKFGESGADNSLEHYLNNIEDLFKSGKISKTKYNKLKMAEQDIPDGFIERDLRNTQYIAKKALSMLNEISHRVVATSGSVTDKLREDWQLIDVMKELNWEKYKALGLVEYFEDRDGRQIGRIKDWTKRNDHRHHAMDALTVAFTKDVFIQYFNNKNASLDPNANEHAIKNKYFQNGRAIAPMPLREFRAEAKKHLENTLISIKAKNKVITGNINKTRKKGGVNKNMQQTPRGQLHLETIYGSGKQYLTKEEKVNASFDMRKIGTVSKLAYRDALLKRLYENDNDPKKAFAGKNSLDKQPIWLDKEQMRKVPEKVKIVTLEAIYTIRKEISPDLKVDKVIDVGVRKILIDRLNEYGNDAKKAFSNLDENPIWLNKEKGISIKRVTISGISNAQSLHVKKDKDGKPILDENGRNIPVDFVNTGNNHHVAVYYRPVIDKRGQLVVDEAGNPKYELEEVVVSFFEAVTRANLGQPIIDKDYKTTEGWQFLFSMKQNEYFVFPNEKTGFNPKEIDLLDVENYGLISPNLFRVQKFSLKNYVFRHHLETTIKDTSSILRGITWIDFRSSKGLDTIVKVRVNHIGQIVSVGEY

SEQ ID NO: 161 - protein, 1517 aa, Bacteroides sp.
MKKIVGLDLGTNSIGWALINAYINKEHLYGIEACGSRIIPMDAAILGNFDKGNSISQTADRTSYRGIRRLRERHLLRRERLHRILDLLGFLPKHYSDSLNRYGKFLNDIECKLPWVKDETGSYKFIFQESFKEMLANFTEHHPILIANNKKVPYDWTIYYLRKKALTQKISKEELAWILLNFNQKRGYYQLRGEEEETPNKLVEYYSLKVEKVEDSGERKGKDTWYNVHLENGMIYRRTSNIPLDWEGKTKEFIVTTDLEADGSPKKDKEGNIKRSFRAPKDDDWTLIKKKTEADIDKIKMTVGAYIYDTLLQKPDQKIRGKLVRTIERKYYKNELYQILKTQSEFHEELRDKQLYIACLNELYPNNEPRRNSISTRDFCHLFIEDIIFYQRPLKSKKSLIDNCPYEENRYIDKESGEIKHASIKCIAKSHPLYQEFRLWQFIVNLRIYRKETDVDVTQELLPTEADYVTLFEWLNEKKEIDQKAFFKYPPFGFKKTTSNYRWNYVEDKPYPCNETHAQIIARLGKAHIPKAFLSKEKEETLWHILYSIEDKQEIEKALHSFANKNNLSEEFIEQFKNFPPFKKEYGSYSAKAIKKLLPLMRMGKYWSIENIDNGTRIRINKIIDGEYDENIRERVRQKAINLTDITHFRALPLWLACYLVYDRHSEVKDIVKWKTPKDIDLYLKSFKQHSLRNPIVEQVITETLRTVRDIWQQVGHIDEIHIELGREMKNPADKRARMSQQMIKNENTNLRIKALLTEFLNPEFGIENVRPYSPSQQDLLRIYEEGVLNSILELPEDIGIILGKFNQTDTLKRPTRSEILRYKLWLEQKYRSPYTGEMIPLSKLFTPAYEIEHIIPQSRYFDDSLSNKVICESEINKLKDRSLGYEFIKNHHGEKVELAFDKPVEVLSVEAYEKLVHESYSHNRSKMKKLLMEDIPDQFIERQLNDSRYISKVVKSLLSNIVREENEQEAISKNVIPCTGGITDRLKKDWGINDVWNKIVLPRFIRLNELTESTRFTSINTNNTMIPSMPLELQKGFNKKRIDHRHHAMDAIIIACANRNIVNYLNNVSASKNTKITRRDLQTLLCHKDKTDNNGNYKWVIDKPWETFTQDTLTALQKITVSFKQNLRVINKTTNHYQHYENGKKIVSNQSKGDSWAIRKSMHKETVHGEVNLRMIKTVSFNEALKKPQAIVEMDLKKKILAMLELGYDTKRIKNYFEENKDTWQDINPSKIKVYYFTKETKDRYFAVRKPIDTSFDKKKIKESITDTGIQQIMLRHLETKDNDPTLAFSPDGIDEMNRNILILNKGKKHQPIYKVRVYEKAEKFTVGQKGNKRTKFVEAAKGTNLFFAIYETEEIDKDTKKVIRKRSYSTIPLNVVIERQKQGLSSAPEDENGNLPKYILSPNDLVYVPTQEEINKGEVVMPIDRDRIYKMVDSSGITANFIPASTANLIFALPKATAEIYCNGENCIQNEYGIGSPQSKNQKAITGEMVKEICFPIKVDRLGNIIQVGSCILTN

SEQ ID NO: 162 - protein, 1399 aa, Olsenella uli
MNLRNTTDEYNIGLDMGTNSVGWAVTDKAGAIAHFKGKPTLGSRLFDAAQTAAGARIHRSQRRRYVRRRWRLDLLQSLFQDEVSKVDSEFFCRLRQSRLYVGDREKGHADYTWPIFNDSDFNEVDYYKRFPTIYHLRKWLMETDEKADIRLIYLATHNIVKHRGNFLRENNKSLSSRDANPAQAVKSLRLALNDWCSERDYECAWKGEEDDGAIDEAILNVLADGEKGRSDQAKEIAKLTGVDCGDAKQSKQCNEAIAKAIVGLKVEMKNIFGEFPAEKTSYIYLSSDEDVEAVRESCPDDSGELFQALCKLYSAYILQELLSYADPSGQTISANMVAKYKQYGRDLRLLKELTRTYAPQKYDLFFRGETYAGSSDYVVDEARGYTRYNLGTTKANYDDFQKSVKELFKGTDALQDERYQEMMVAFGEQKFLRRLKTSDNGSIYYQLHLEELHTILENQGKHYPFLLSEEDKIESLVSFRIPYYVGPLTRKNAAIGHDGKERFAWSSRKDGMEHAVITPWNWEEIIDRDKSAEDFIMRMTGDCTYLQGEPVLPKCSLLYEEFCALNEFNGAHWTVDGDDERRFDAAQRERIMCDLFRRTRSVTYNKVSDWLERKYNFTGARVRGGQGEHGFESKLGSYIFFCKDVFKTDGLDEADYTMIEQIILWSTLFEDRDILKRKIEEAYGGDRLTSEQIKVICKKRFTGWGRLSKRLLTDIKVNTDTGRKSIMDVLREGNPNNGQRSRTMVFMEVLRDEDLGFQKAIDGLNRDYFREHNNGLMDVNDLPGSPAIRRSINQAVRIVDEIASIARKEPTNIFIEVTREEDDPRKKGKRTKRRYDAIKSALEKFKKDDPSLWKELCEKAPGDMDERLSLYFMQRGKCMYSGRPIKIEELHTGKYEVDHIIPRSYIKDDSFENKVLVYREENQHKTDALLIDSSIRQKMGGYWRMLHDAKLVGDKKFRNLFRNHIDDKAMKGFVARQIVETSQMVKLVQTLFEARYPNTRIVPVKAGISHDLREAAGLVKCREANDFHHAHDAFLACRIGLFIQKRHPSVYDNPIGLARIMRDYARMQAREYKKSHCLAHTQGFIVNSFLSSGFDEETGEIFKDDWDAKAEVEGIRRVLNCRQCFISRMPVEGDTRYGGRYWGETIYSPKGKHKHEIPLKQGLDPNLYGGYSDLLYSYFLIYEASDVSSGERVLRFIGIPTSIAARMANQKRLEEYVSRLALQENLEHVRMVRKIMKKQLIEVDNCRLLVTAADAVTNATELAFSLDEMKIISTCAKCINGADPSAIDKIGNAQDSFFDNLKRRGSDRCALLFSQLKLDKLSQNFYMISSDDKSKILISILDRIRAKSNSVDLSLVGGAKHAAQMKFDFNAKLNNPASSFVLIDQSVTGMFERRTRIGL

SEQ ID NO: 163 - protein, 1398 aa, Veillonella atypica
METQTSNQLITSHLKDYPKQDYFVGLDIGTNSVGWAVTNTSYELLKFHSHKMWGSRLFEEGESAVTRRGFRSMRRRLERRKLRLKLLEELFADAMAQVDSTFFIRLHESKYHYEDKTTGHSSKHILFIDEDYTDQDYFTEYPTIYHLRKDLMENGTDDIRKLFLAVHHILKYRGNFLYEGATFNSNAFTFEDVLKQALVNITFNCFDTNSAISSISNILMESGKTKSDKAKAIERLVDTYTVFDEVNTPDKPQKEQVKEDKKTLKAFANLVLGLSANLIDLFGSVEDIDDDLKKLQIVGDTYDEKRDELAKVWGDEIHIIDDCKSVYDAIILMSIKEPGLTISQSKVKAFDKHKEDLVILKSLLKLDRNVYNEMFKSDKKGLHNYVHYIKQGRTEETSCSREDFYKYTKKIVEGLADSKDKEYILNEIELQTLLPLQRIKDNGVIPYQLHLEELKVILDKCGPKFPFLHTVSDGFSVTEKLIKMLEFRIPYYVGPLNTHHNIDNGGFSWAVRKQAGRVTPWNFEEKIDREKSAAAFIKNLTNKCTYLFGEDVLPKSSLLYSEFMLLNELNNVRIDGKALAQGVKQHLIDSIFKQDHKKMTKNRIELFLKDNNYITKKHKPEITGLDGEIKNDLTSYRDMVRILGNNFDVSMAEDIITDITIFGESKKMLRQTLRNKFGSQLNDETIKKLSKLRYRDWGRLSKKLLKGIDGCDKAGNGAPKTIIELMRNDSYNLMEILGDKFSFMECIEEENAKLAQGQVVNPHDIIDELALSPAVKRAVWQALRIVDEVAHIKKALPSRIFVEVARTNKSEKKKKDSRQKRLSDLYSAIKKDDVLQSGLQDKEFGALKSGLANYDDAALRSKKLYLYYTQMGRCAYTGNIIDLNQLNTDNYDIDHIYPRSLTKDDSFDNLVLCERTANAKKSDIYPIDNRIQTKQKPFWAFLKHQGLISERKYERLTRIAPLTADDLSGFIARQLVETNQSVKATTTLLRRLYPDIDVVFVKAENVSDFRHNNNFIKVRSLNHHHHAKDAYLNIVVGNVYHEKFTRNFRLFFKKNGANRTYNLAKMFNYDVICTNAQDGKAWDVKTSMNTVKKMMASNDVRVTRRLLEQSGALADATIYKASVAAKAKDGAYIGMKTKYSVFADVTKYGGMTKIKNAYSIIVQYTGKKGEEIKEIVPLPIYLINRNATDIELIDYVKSVIPKAKDISIKYRKLCINQLVKVNGFYYYLGGKTNDKIYIDNAIELVVPHDIATYIKLLDKYDLLRKENKTLKASSITTSIYNINTSTVVSLSNKVGIDVFDYFMSKLRTPLYMKMKGNKVDELSSTGRSKFIKMTLEEQSIYLLEVLNLLTNSKTTFDVKPLGITGSRSTIGVKIHNLDEFKIINESITGLYSNEVTIV

SEQ ID NO: 164 - protein, 795 aa, Prevotella disiens
MEKQRILGLDPGTNSLGWAVLDFDNSKQEYNLVRKGEVIFEEGVGKSKRGEFSKAAYRTFYKSTRKHYFRRRLRKIEVLKVLVKYDFCPYLSDDLLKQWHEKKIYPAVKEFMDWQRTSDAEGKNPYYDRHCCLNEKLDLSLKSDRYVLGRALYHLTQRRGFKSNRLIQNNDENEEGKVKKGISELSTEMQEANCNYLGDYFYKLYTEKGNTVQIRKRYTDREKHYKNEFNAICEKQELNETIVKELDKAIFFQRKLKPQRHGVGKCTFEPNNRRCAISHPDFERFRMLCFINNIKIKTPFEENLRPLNNEEKALIEPLFYRKSIKNFDFEEIAKKLAGKNNYCYIKDDSSKQYKFNYRMSQGASTCQTIAKLKSIFGEEWKNGIAETYTNRRKKEGLKKQAEMVDDIWNVLYSVSECDVLKDFAINKLQLDEKTADNFSKTKLAQGFATLSLKAIRKILPFLEQGFGYTEAVFLANIPTVVGKEYWNNEDIRNDIMEEIKTIFYHNTLKTNDSHNTILFCIKDILSNNFDLAPGAIDKLYHPSMINVYKDVIPNEDGILQLGSPKIDAVKNPMAMRSLHIIRKVVNELLREGIINSDTEVRIEYARELNDANKRHAIADWQKKQYGKHQKYRKEIKELFKAETGFEIEPNETDILKFELWEEQNHICLYTGQEIGISEFVGENPKYDIEHTIPRSLGGDSTKMNMTLCENKFNRENKQKKLPSELANHSEILERIDDWKKKIYILQKKYDSIRTHNGMDKENKDKKIVSMQVRISGSSICVYSQNTLLWLQYGYN

SEQ ID NO: 165 - protein, 1428 aa, Burkholderiales bacterium
MGKTHIIGVGLDLGGTYTGTFITSHPSDEAEHRDHSSAFTVVNSEKLSFSSKSRTAVRHRVRSYKGFDLRRRLLLLVAEYQLLQKKQTLAPEERENLRIALSGYLKRKGYARTEAETDTSVLESLDPSVFSSAPSFTNFFNDSEPLNIQWEAIANSPETTKALNKELSGQKEADFKKYIKTSFPEYSAKEILANYVEGRRAILDASKYIANLQSLGHKHRSKYLSDILQDMKRDSRITRLSEAFGSTDNLWRIIGNISNLQERAVRWYFNDAKFEQGQEQLDAVKLKNVLVRALKYLRSDDKEWSASQKQIIQSLEQSGDVLDVLAGLDPDRTIPPYEDQNNRRPPEDQTLYLNPKALSSEYGEKWKSWANKFAGAYPLLTEDLTEILKNTDRKSRIKIRSDVLPDSDYRLAYILQRAFDRSIALDECSIRRTAEDFENGVVIKNEKLEDVLSGHQLEEFLEFANRYYQETAKAKNGLWFPENALLERADLHPPMKNKILNVIVGQALGVSPAEGTDFIEEIWNSKVKGRSTVHSICNAIENERKTYGPYFSEDYKFVKTALKEGKTEKELSKKFAAVIKVLKMVSEVVPFIGKELRLSDEAQSKFDNPYSLAQLYNLIETERNGFSKVSLAAHLENAWRMTMTDGSAQCCRLPADCVRPFDGFIRKAIDRNSWEVAKRIAEEVKKSVDFTNGTVKIPVAIEANSFNFTASLTDLKYIQLKEQKLKKKLEDIQRNEENQEKRWLSKEERIRADSHGICAYTGRPLDDVGEIDHIIPRSLTLKKSESIYNSEVNLIFVSAQGNQEKKNNIYLLSNLAKNYLAAVFGASDLSQITNEIESTVLQLKAAGRLGYFDLLSEKERACARHALFLNSDSEARRAVIDVLGSRRKASVNGTQAWFVRSIFSKVRQALAAWTQETGNELIFDAISVPAADSSEMRKRFAEYRPEFRKPKVQPVASHSIDAMCIYLAACSDPFKTKRMGSQLAIYEPINFDNLFTGSCQVIQNTPRNFSDKTNIANSPIFKETIYAERFLDIIVSRGEIFIGYPSNMPFEEKPNRISIGGKDPFSILSVLGAYLDKAPSSEKEKLTIYRVVKNKAFELFSKVAGSKFTAEEDKAAKILEALHFVTVKQDVAATVSDLIKSKKELSKDSIENLAKQKGCLKKVEYSSKEFKFKGSLIIPAAVEWGKVLWNVFKENTAEELKDENALRKALEAAWPSSFGTRNLHSKAKRVFSLPVVATQSGAVRIRRKTAFGDFVYQSQDTNNLYSSFPVKNGKLDWSSPIIHPALQNRNLTAYGYRFVDHDRSISMSEFREVYNKDDLMRIELAQGTSSRRYLRVEMPGEKFLAWFGENSISLGSSFKFSVSEVFDNKIYTENAEFTKFLPKPREDNKHNGTIFFELVGPRVIFNYIVGGAASSLKEIFSEAGKERS

SEQ ID NO: 166 - protein, 1025 aa, gamma proteobacterium
MGGYMPQLMRYRLALDIGSTSIGWAMIRLSMQNEPIAIIRMGVRIFSDGRNPKDGSSLAVTRRVARQMRRRRDRLLKRKTRLLNALVQKKFFPEDADARKALVVLNPYELRKEGLYRQLSGPEFGRALFHISQRRGFLSNRKTDKKDNDSSVLKKAIVDLRQQLEVENCQTIGEWLFKQQQSGKSVRARLRGKTQKDKAYDFYIDRAMIAHEFDTLWVSQAKYDPLLFNEDARAILRDILLYQRPLKPVKPGRCTLIPDESRAPLALPLTQQARIYQELNHLRITTPALGAQALTVAQRNTIAALLEKSDVTFVKIAKALGLTSTTEFNLQDIKRDRLKGNATAIILARNQYFGRRWHDFNADLQNLIVDKLVNEGSETALIEWLKANTDVDESAAERVSGVTLPEGYGSLSVAALRRLLPALKEDVVVYSEAVKRAGFDSHSALSLIEQTGELYQELPYYGEVLQRHVGFGSGDPNDSPERRFGKIANPTVHIGLNELRKIINALIKRYGNPAEVVVELARDLKLSREKRKEIQEEQKQRQDRNEKRIKDACEILGIDPLVIDRGKRREISQKMQLWDELNPKDAANRRCPYTGDQISIEKLLSAEVEIEHILPFSKTLDDSLNNKTVAMRRANRDKGNRTPYEAFGESLNPDYDYDAILQRASLMPREKRKRFASDGYQQWLRDDKDFLSRALNDTAYLSRIAKEYLTLICPPNSVRAIPGRMTAQLRAMFGLNRLLSEGGIKNREDHRHHAIDAAVIGVTDQGLLQKFSRASARTRELQLSRLVDDMPLPWDTYREHVTRALEHLVVSHKPDHGYQGKMHEDTAWGLRDNGQVTRRVRSEDGGPRQRLLENKNVVKINSTRDFSRHGIDEQGQVNAYKGYVGGSNYCIEIWIDEKGKWNSDVVSTFQAYQIVRELGEKAAWQKLRNPLLSLSAKPLVMRLIIDDVVKMQIAGQNKIMRVVKIAQNGQIFFAEHNEANVDARDKDKNNPFKYISKTAGSLQKAGGIHMAISPIGDARPVRYGR

SEQ ID NO: 167 - protein, 1364 aa, Pediococcus acidilactici
MGDRKYNLGLDIGTSSIGFAAVDENNQPIRVKGKTAIGVRLFEEGKTAADRRGFRTTRRRLSRRRWRINLLNEIFDAHLAEVDPTFLARLKESNRSNLDPKKSFQGSLLFPERKDYQFYEEYPTIYHLRKALMEKDRKFDFREIYLAVHHIIKYRGNFLNGTPMRSFKVENIELDTLFDQLNQLYAEIVPDNELAFDLAQVADVKDVLSSTTIYKMDKKKQLVKMMLLPASNKALQSENKKIVTQFVNAILNYKFKLDVLLQVETDADWSLKLNDEGADDKLEEFTGDLDENRLEIIDLLQRLHNWFSLNEITKDGNSLSAAMVEKYENHHHHLGLLKKVIENHPDAKKAKALKETYTAYVGKTDDKTQNQDDFYKAVEKNLDDSPDAKEIKRLIQLDQFMPKQRTGQNGAIPHQLHQQELDQIIEKQSKYYPFLAEPNPNVKRRKDAPYKLDELIAFKIPYYVGPLVTPEEQAQNGENVFAWMKRKAAGPITPWNFDEKVDRMESANRFIRRMTTKDTYLFGEDVLPAESMIYQKFVVLNELNNLKINGRHLSLKDKQDVYNDLFKQQKTVSIKALQNYYVTKKKAATAPTVGGLADPKKFLSSLSTYIDFKNMFGERVNDPQFQEDLEQIVEWSTIFEDRGIFKAKLQALGWLSEKQIQQLVAKRYKGWGRLSKKLLTGLKNAEGYSILDEMWRSTGNFMQIQSRPEFAALIQQANEKQFEGNDPDNVWENIENILGDAYTSPQNKKAIRQVVKVVQDIEKAVGNPPEKIAIEFTREAAANPQRTQSRLRTLEKLYESAEEVVDAGLTAELAEFKENKHVLSDKYYLYFTQLGRDVYTGDTISLDKLNDYDVDHILPQSFIKDDSLDNRVLTIRAVNNGKSDNVPAKMFGKKMGSFWRYLLDNGMISKRKYNNLITDPDNISKYAQKGFINRQLVETSQVIKLTANILNGIYDKDTEIIEVPAKMNSQMRKMFDLVKVREVNDYHHAFDAYLTIFIGNYLYKCYPKLQPYFVYDNFKKFGNKEDIGHKRFNFLGKIEREKKVVAPETGEILWSNVAPNETIKQIKKVYDYKFMIVSREITTRRAELFNQTVYPKNYHGKLIPIKEDRPTDLYGGYSGNTDAYLAIVALEDKKKGKYFKVVGIPTRVAAKLEKLKQQDSQQYLQALHKVIAPQFTKSTKKGIKKTEFEIVLDKVHYRQLVQDGPVKMMLGSSTYKYNAKQLVLSEKALQVIADDRKFDETQKDDNLIAVYDEILSIVNQSFDLYDINGFRKKLNDNRDQFIDLPAETKYEGRKVVAHGKREMILEILKGLHANAAFGNLKPIGFSTAFGQLQVPNGIILSKNAILIHQSPSGLFERKIKLSDL

SEQ ID NO: 168 - protein, 1364 aa, Peptoniphilus duerdenii
MKNLKEYYIGLDIGTASVGWAVTDESYNIPKFNGKKMWGVRLFDDAKTAEERRTQRGSRRRLNRRKERINLLQDLFATEISKVDPNFFLRLDNSDLYREDKDEKLKSKYTLFNDKDFKDRDYHKKYPTIHHLIMDLIEDEGKKDIRLLYLACHYLLKNRGHFIFEGQKFDTKNSFDKSINDLKIHLRDEYNIDLEFNNEDLIEIITDTTLNKTNKKKELKNIVGDTKFLKAISAIMIGSSQKLVDLFEDGEFEETTVKSVDFSTTAFDDKYSEYEEALGDTISLLNILKSIYDSSILENLLKDADKSKDGNKYISKAFVKKFNKHGKDLKTLKRIIKKYLPSEYANIFRNKSINDNYVAYTKSNITSNKRTKASKFTKQEDFYKFIKKHLDTIKETKLNSSENEDLKLIDEMLTDIEFKTFIPKLKSSDNGVIPYQLKLMELKKILDNQSKYYDFLNESDEYGTVKDKVESIMEFRIPYYVGPLNPDSKYAWIKRENTKITPWNFKDIVDLDSSREEFIDRLIGRCTYLKEEKVLPKASLIYNEFMVLNELNNLKLNEFLITEEMKKAIFEELFKTKKKVTLKAVSNLLKKEFNLTGDILLSGTDGDFKQGLNSYIDFKNIIGDKVDRDDYRIKIEEIIKLIVLYEDDKTYLKKKIKSAYKNDFTDDEIKKIAALNYKDWGRLSKRFLTGIEGVDKTTGEKGSIIYFMREYNLNLMELMSGHYTFTEEVEKLNPVENRELCYEMVDELYLSPSVKRMLWQSLRVVDEIKRIIGKDPKKIFIEMARAKEAKNSRKESRKNKLLEFYKFGKKAFINEIGEERYNYLLNEINSEEESKFRWDNLYLYYTQLGRCMYSLEPIDLADLKSNNIYDQDHIYPKSKIYDDSLENRVLVKKNLNHEKGNQYPIPEKVLNKNAYGFWKILFDKGLIGQKKYTRLTRRTPFEERELAEFIERQIVETRQATKETANLLKNICQDSEIVYSKAENASRFRQEFDIIKCRTVNDLHHMHDAYLNIVVGNVYNTKFTKNPLNFIKDKDNVRSYNLENMFKYDVVRGSYTAWIADDSEGNVKAATIKKVKRELEGKNYRFTRMSYIGTGGLYDQNLMRKGKGQIPQKENTNKSNIEKYGGYNKASSAYFALIESDGKAGRERTLETIPIMVYNQEKYGNTEAVDKYLKDNLELQDPKILKDKIKINSLIKLDGFLYNIKGKTGDSLSIAGSVQLIVNKEEQKLIKKMDKFLVKKKDNKDIKVTSFDNIKEEELIKLYKTLSDKLNNGIYSNKRNNQAKNISEALDKFKEISIEEKIDVLNQIILLFQSYNNGCNLKSIGLSAKTGVVFIPKKLNYKECKLINQSITGLFENEVDLLNL

SEQ ID NO: 169 - protein, 1089 aa, Corynebacterium matruchotii
MNSANVNYRVGIDVGSYSLGMAAIAIDDDGKPTEILSAISLIHDSGVDPDSAKSAATRLATSGIARRTRRLYRRKRKRLAKLDKFISSQGWPLKEFEKYEDPFYPWRVRAELATTAITDQQELGEKLSIALRHIARHRGWRNPYSKVTALYTVTEPSDAFLAMQEECAKQLGRTIPETITVGQLVTGMNLGKTRLRGENSLLAARPRQSDNANEIHTIAKVQGLSNELVRQIIDHVFAAESPKGSAAEQVGKDPLQPTKKRALKASDAFQQYRIAALIGNLRIRGGKGNRRLTTEETRLVFDYLRSLPAKQEPTWQLVAEQLKIDRGNLVGTAIMTDDGERAGAKPPVHDTNRIMENTKIKPLATWWKSADADARAAMVKALSNAEVDDFDSQAGAQVQEFFFGISDEDQEKLDGLHLPIGRAAYSEDTLDRLTKRMIGEGMDLYEARQAEFKISNDWAPPAPEIGERVGNPAVDRVLKATARWLNAAERQWGAPKSVNIEHVRAAFMSESSARELDRDNQQRAKRNVKVVAEMQEKLGIEGRPSRADVWRFQSIQRQNGKCAYCGAEISFKNSEMDHIIPQAGEGSTNTRDNLVAVCRECNSSKSNIAFAVWAENTSRPGVSVQKAIERTHHWVTDSGLRKPEFDKFRKQVCDRLRRKATDEPIDARSLESVAWMANELRSRIAQKFKDGDTKVRVYKGALTAEARRASGISGKLEFVDGKGKSRLDRRHHAVDAAVVAFTSNYVAETLALRSNMKFDQELRRKAPQWREFTGSDHVHQVEWTKWKYRMQALAELLNNALVQDRIVVMHNLRLRLGNGAAHEDTIGKLTRLKVGDAISTTDIDRASSEALWCALTRDPDYDPKTGLPENPNRTIRIHGTHLTASDEITVFPVAAASIPIRDGFAKLGSNYHHVRLFRVPSGKKYKYCLMQVYTVDLLKFRKEDLFTVELKPQTISVRTCEALLRKALANGTAEYLGWLVSDDELLIDTSSFDTPGIVKLREEYGPVNRWRLAGLTSVTRLNLRPLYLSKEGLKPNVNPEIKKIIDNRSWIITVNKLFSSGHVKIIRRDALGRPRLHSAAHLPICWEVK

SEQ ID NO: 170 - protein, 1134 aa, Streptococcus mitis
MNGLVLGLDIGIASEGVGILEKNSGKIIHANSRLFPAATADNNVERRKNRQARRLNRRKKHRGVRFQDLFEDYGLLTDFSKVSINLNPYRLRVDGLNQQLTNEELFIALKNIVKRRGISYLDDASEDGGAVSSDYGKAVEENRKLLAEQTPGQIQLERFEKYGQVRGDFTVVENGEKLRLINVFSTSAYKKEAERILRKQQEFNNQITDEFIEDYLKILTGKRKYYHGPGNEKSRTDYGRFRTDGTTLDNIFGILIGKCTFYPEEYRASKASYTAQEFNLLNDLNNLTVPTETKKLSEEQKKVIVEYAKEAKTLGASTLLKYIAKMIDASVDQIRGYRVDVNNKPEMHTFEVYRKMQSLETISVGELSRNVLDELAHILTLNTEREGMEEAINTKLKDSFSQDQVLELVQFRKNNSSLFSKGWHNFSLKLMMELIPELYETSEEQMTILTRLGKQKSKETSKRTKYIDEKELTEEIYNPVVAKSVRQAIKIINEATKKHGIFDNIVIEMARENNEEDAKKDYIKRQKANQDEKNAAMEKAAFQYNGKKELPDNIFHGHKELATKIRLWHQQGEKCLYTGKTIPISDLIYNQYKYEIDHILPLSLSFDDSLSNKVLALATANQEKGQRTPFQALDSMDDAWSYREFKSYVKDLKSLSNKKKDYLLTEEDISKIEVKQKFIERNLVDTRYSSRVVLNALQDFYKSHQFDTTISVVRGQFTSQLRRKWGLEKSRETYHHHAVDALIIAASSQLRLWKKQNNPLITYKEGQFVDSQTGEIISLTDDEYKELVFKAPYDHFVDTLSSKTFEDSILFSYQVDSKFNRKISDATIYATRKAKLDKEKKEYTYTLGKIKDIYSLGTKTPSKTGFYKFLDLYNKDKSQFLMFQKDRKTWDEVIEKIMEQYRPFKEYDKTGKLVDFNPFEKYRQENEPIRKYSKKGNGPEIKSLKYYDILLGKHKNITPEGSRNTVALLSLNPWRTDVYYNMETKKYEFLGLKYADLPFEEGGAYGISTETYNELREKEGIGKNSEFKFTLYKNDLILIKDTETNCQQIFRFWSRTGKDNPKSFEKHKIELKPYEKARFEKGEELEVLGKVPPSSNQLQKNMQIENLSIYKVKTDVLGNKHFIKKEGDKPKLKF

SEQ ID NO: 171 - protein, 1373 aa, Streptococcus bovis
MTKKNYSIGLDIGTNSVGWAVITDDYKVPAKKMKVLGNTDKKYIKKNLLGALLFDSGETAEATRLKRTARRRYTRRKNRLRYLQEIFAEEMTKVDESFFQRLDESFLRWDDDNKKLGRYPIFGNKADVVKYHQEFPTIYHLRKHLADSSEKADLRLVYLALAHMIKFRGHFLIEGELNAENTDVQKIFADFVGVYDRTFDDSHLSEITVDAASILTEKISKSRRLENLIKYYPTEKKNTLFGNLIALALGLQPNFKMNFKLSEDAKLQFSKDSYEEDLGELLGKIGDDYADLFTSAKNLYDAILLSGILIVDDNSTKAPLSASMIKRYVEHQEDLEKLKEFIKANKSELYHDIFKDKNKNGYAGYIENGVKQDEFYKYLKNTLSKIAGSDYFLDKIEREDFLRKQRTFDNGSIPHQIHLQEMHAILRRQGDYYPFLKENQDRIEKILTFRIPYYVGPLARKDSRFSWAEYHSDEKITPWNFDKVIDKEKSAEKFITRMTLNDLYLPEEKVLPKHSHVYETYAVYNELTKIKYVNEQGKDSFFDSNMKQEIFDHVFKENRKVTKEKLLNYLNKEFPEYRIKDLIGLDKENKSFNASLGTYHDLKKILDKAFLDDKVNEEVIEDIIKTLTLFEDKDMIHERLQKYSDIFTADQLKKLERRHYTGWGRLSYKLINGIRNKENNKTILDYLIDDGSANRNFMQLINDDTLPFKQIIQKSQVVGDVDDIEAVVHDLPGSPAIKKGILQSVKIVDELVKVMGDNPDNIVIEMARENQTTNRGRSQSQQRLKKLQNSLKELGSNILNEEKPSYIEDKVENSHLQNDQLFLYYIQNGKDMYTGDELDIDHLSDYDIDHIIPQAFIKDDSIDNRVLTSSAKNRGKSDDVPSLDIVRARKAEWVRLYKSGLISKRKFDNLTKAERGGLTEADKAGFIKRQLVETRQITKHVAQILDARFNTESDENDKVIRDVKVITLKSNLVSQFRKDFEFYKVREINDYHHAHDAYLNAVVGTALLKKYPKLASEFVYGEYKKYDIRKFITNSSDKATAKYFFYSNLMNFFKRVIRYSNGKVIVRPVVEYSKDTEDIAWDKKSNFRTICKVLSYPQVNIVKKVETQTGGFSKESILPKGDSDKLIPRKTKKAYWDTKKYGGFDSPTVAYSVFVVADVEKGKAKKLKTVKELVGISIMERSFFEENPVEFLENKGYHNIREDKLIKLPKYSLFEFEGGKRRLLASASELQKGNEMVIPGHLVKLLYHAQRINSFNSTKYLDYVSAHKKEFEKVLSCVEDFANLYVDVEKNLSKIRAVADSMDNFSIEEISNSFINLLTLTALGAPADFNFLGEKIPRKRYTSTKECLNATLIHQSITGLYETRIDLSKIGEE

SEQ ID NO: 172 - protein, 1099 aa, Corynebacterium accolens
MSLLYRVGIDVGTYSLGCTAIEVDDNDQPVSILSSVSLIHDSGLDPDQQKRAVTRLASSGVARRTRRLYRRRRRRMVKLENFLTAQGWETLPFERYSDPYLPWHARVALVNGYISDDTQRGQYLSIAFRHIANHRGWRNPYWKVSSLYSPDKPSDAFEQIRKELEASTGRQIPETATVGQLISFAQFGKDRLRGGGKQKDKKKPQEQVNQAVISARLHQIDHAREINEICRVQKIDDTLRKQILDLVFAAESPKGAQKGRVGKDPLQPKLFRALKASDAFQQYRIAALTGNLRIYRNGVTVPLDRDEKLIVFNYLVNLPKKEEPSWLKIAEILNIDRGQLRGTATMTDDGERAGATPPVHDTNRTILDSKVKPLAHWWENASDDERAAMLKSLSNSEVEDFDSPAGAQVQAFFADLDETEQEKLDSLHLPMGRAAYSEDTLMRLTNRMLDENLDLYEARLAEFGIPKDWAPPAPRIGEPVGNPAVDRVLKGVARWLEAAADEWGAPKSVVIEHVRDGFVSKSKAIEIDRANNNRHKRNRELFQKMQENLGIEGKVRSSDLWRYQSVQRQNCQCAYCGSPITYTTCEMDHIVPRAGEGSTNTRDNLVATCHRCNLAKKNIPFAVWAEKSTIPGVSVKEALDRTRHWSEDSGMSKKDFQKFRKNVCERLNRTVVDEPLDARSMESVAWMANELRGRVAQRFQEENTTVNVYRGALTAEARRAAGITDKLRFIDGTGKSRLDRRHHAVDAAVVAFIHNYVAETLAIRSNKKREAQLLQGTSQWKEFTGSDDKHRAVWNAWIPKMQKLAVLLQIALDEDRIVVTSNLRLRLGNGRAHEDTISELKTIRVGDAISVTDIDRASSEALWCALTREPDFDEKDGLPENPNRRIRVHGTWYDAEDEIEVFPVGAGAIKVRGGYAKLSRFHHARVYKIPGKKAPIYCMLRVYNTDLVQHRHEDLFSVELKPQTMSVRQAEPKLRKALAENTAEYLGWLVTDDELIIDTSTFRTGLIEEMQSEFGLVRRWRLDGFDSPSLLTLRPLHMSAEGLPDDCALGSRKIIDTKGWRVSINKVFNAGNTTVVRRDALGRARLTSNAHLPISWKEE

SEQ ID NO: 173 - protein, 1054 aa, Actinobacillus pleuropneumoniae
MKLTPLNYILGLDLGIASVGWAVVEIDEQENPLGLIDVGVRTFDRAEVAKTGESLALARRLARSSRRLVKRRADRIKKVKRLLKSENILLSADEQLPNDVWQLRVKGLDQKLERQEWAAVLLHLLKHRGYLSQRKNESKSENKELGALRSGVAANHQILQSAEYRTPAEIAVKKFHVEEGHIRNQRGAYTHTFSRLDLLAEIELLFTRQTELGNPHTSAKLLENLTALLMWQKPALAGEAILKMLGKCTFEPTEYKAAKNSYSAERFVWLTKLNNLRILEQGAERALTDNERFALLDQPYEKAKFTYAQARTMLALPDEAIFKGVRYQGEDKKAVETKTILMEMKAYHQIRKALENADLKAEWNELKNNSELLDDIGTAFSLHKTDEDICRYLDGKLSESILNALLENLNFDKFIQLSLKALQQILPLMLQGQRYDEAVSAIYGDHYGKKSAEINRLLPTIPADEIRNPVVLRTLTQARKVINAVVRLYGSPARIHIETGREVGKSYQDRKKLEKQQEDNRKHRESAVQKFKEYFPNFVGEPKGKDILKMRLYELQQAKCLYSGKSLELHRLLEKGYVEVDHALPFSRTWDDSFNNKVLVLANENQNKGNLTPYEWLDGKNNSEPWQNFVARVQTSGFSHTKKQRILSHKLDEKGFIERNLNDTRYVVRFLCNFIADNMLLTGKGKRKVFASNGQITALLRGRWGLQKVRDDNDRHHALDAVVVACSTVAMQQKITRFVRYEEGNVFSGERIDRETGEIIPLHFPSPWAFFRENVEIRIFSENPKLELENRLPDYPQYNHEFVQPLFVSRMPTRKMTGQGHMETVKSAKRLDEGLSVLKVPLTQLKLNDLERMVNREREMALYESLKVRLEQFDNDPAKAFAEPFYKKGGALVKAVRVEQTQKSGVLVRDGNGVADNASMVRVDVFTKAGKYFLVPIYTWQVAKGILPNKAVTANVDEIDWLEMDESYQFIFTMYPNDLVKVKLKKEEFFGYYGGLDRATGAIVIKEHDLEKSKGRQGIYRIGVKLALSFEKYQVDELGKNIRPCRPTKRQHVR

SEQ ID NO: 174 - protein, 1369 aa, Lactobacillus iners
MNNNYYLGLDLGTNSVGWAVTDDHYNIIKFHGKHMWGMRLFEEAETAKDRRLHRQARRRRQRLVERINLLEELFDKEISKVDQGFFARKKESDLHFEDKTTKSEYALFNDKSYTDRDYYKQYPTIFHLIMDLIENDKKRDIRLVYLACHYLIKHRGHFIFDGKNFTVDNSFENLLDKLITYLKDNDDITLSFPKDQLINIFKNSNLNSTEKSDQLKPFFGRTNLEKGIIKLLSGGKQDLSNMFRDETLKNSNYKNLKFSDNRFDDERDGYAADLGDRIDLLILLKQIYDASILESMMSQARVSIDGHKYISSAKVCAYEKHKSDLKRLKSLIKKYLPSEYNNIFRKITEKDNYVAYSKSNITNNKREKALKYVKYVDFTKYLTKKLKTIKTQDAEDDQEIFEIKGELEKQSFLPKQRTLDNSIIPYQLHLMELKKILDNQSKYYDFLLAKDDQEGITVKDKIISLLTFRLPYYIGPVNPAVHGKFAWVKRLANGKVTPWNYKEKIDIDASHEEFIKTKLSKCSFLIGCDVLPKNSLLYQKYMVLSELNTIKFNGVNISEKLKDDIYQNLFKNIQKVTKKRLQNYIKEHENIIGDVIVTGIDNAFKQGLVSYLKFKKIIGDKVDDDRYQKVLEKIIRDITLYDECAGKKIKKEYKDSDLFTEDELNKIVKLTFNDWGRLSAELLDQLEGEDTVSGETGKIIEFMQKHNYNLMQLMSKKFTFKSKIDEINKSYYQHDKFNYKSMIDSLYVSPATKRILWQSLKVVHEISKIMKHDPEKIFIEMARSKEDHPKRKLSRKADLKQVYKDSKKQIISIIGKDKYQDLSNELDNKDDRDLRWDNLYLYYTQLGRSMYSLKPIDISELMNKNLYDQDHIFPKSKKYDDSIENRVLVEKELNVKKSDIYPISDANIIPQKIKGQVESFWKMLYDHKLIGDKKYARLIRSKAFTDDELAGFIARQLVETRQATKETADLLKRLCPKSRIVYAKAQNASIFRQKFDIPKSRTINDLHHAQDAYLNIVVGNIFDTKFTQDPRNFIKNTKDSRNYNLEKIYDYNVERNNYVAWIAPDGETNGTIANVKCNLSTKDFRVTRPSFYKKGALFNQNLSRKGSNLAPIKEHSPKSNPLKYGGYSGKNNSFFVVVAGKDNKGKDIVKLIPVNTLIYNKMLHCDYKAKQELLTSYVANNFAINNFRIVKDDIKMYSLVKIDGAYYYLVGGTDERIEVKNAMQLLLSKDSIKAVKILEKESKDQFANIKNYKDIDIKLGRTFNEVVSKYTNSVFGKSMLISDKYRKDIFKSVEKSILEFNHLDTIGKADNLLKFVTLMRPSGSAHSLKMVGLIERIRKSNVISNFNEFKLINQSVTGLFENEEDLLKL

SEQ ID NO: 175 - protein, 1420 aa, Bifidobacterium bifidum
MSRKNYVDDYAISLDIGNASVGWSAFTPNYRLVRAKGHELIGVRLFDPADTAESRRMARTTRRRYSRRRWRLRLLDALFDQALSEIDPSFLARRKYSWVHPDDENNADCWYGSVLFDSNEQDKRFYEKYPTIYHLRKALMEDDSQHDIREIYLAIHHMVKYRGNFLVEGTLESSNAFKEDELLKLLGRITRYEMSEGEQNSDIEQDDENKLVAPANGQLADALCATRGSRSMRVDNALEALSAVNDLSREQRAIVKAIFAGLEGNKLDLAKIFVSKEFSSENKKILGIYFNKSDYEEKCVQIVDSGLLDDEEREFLDRMQGQYNAIALKQLLGRSTSVSDSKCASYDAHRANWNLIKLQLRTKENEKDINENYGILVGWKIDSGQRKSVRGESAYENMRKKANVFFKKMIETSDLSETDKNRLIHDIEEDKLFPIQRDSDNGVIPHQLHQNELKQIIKKQGKYYPFLLDAFEKDGKQINKIEGLLTFRVPYFVGPLVVPEDLQKSDNSENHWMVRKKKGEITPWNFDEMVDKDASGRKFIERLVGTDSYLLGEPTLPKNSLLYQEYEVLNELNNVRLSVRTGNHWNDKRRMRLGREEKTLLCQRLFMKGQTVTKRTAENLLRKEYGRTYELSGLSDESKFTSSLSTYGKMCRIFGEKYVNEHRDLMEKIVELQTVFEDKETLLHQLRQLEGISEADCALLVNTHYTGWGRLSRKLLTTKAGECKISDDFAPRKHSIIEIMRAEDRNLMEIITDKQLGFSDWIEQENLGAENGSSLMEVVDDLRVSPKVKRGIIQSIRLIDDISKAVGKRPSRIFLELADDIQPSGRTISRKSRLQDLYRNANLGKEFKGIADELNACSDKDLQDDRLFLYYTQLGKDMYTGEELDLDRLSSAYDIDHIIPQAVTQNDSIDNRVLVARAENARKTDSFTYMPQIADRMRNFWQILLDNGLISRVKFERLTRQNEFSEREKERFVQRSLVETRQIMKNVATLMRQRYGNSAAVIGLNAELTKEMHRYLGFSHKNRDINDYHHAQDALCVGIAGQFAANRGFFADGEVSDGAQNSYNQYLRDYLRGYREKLSAEDRKQGRAFGFIVGSMRSQDEQKRVNPRTGEVVWSEEDKDYLRKVMNYRKMLVTQKVGDDFGALYDETRYAATDPKGIKGIPFDGAKQDTSLYGGFSSAKPAYAVLIESKGKTRLVNVTMQEYSLLGDRPSDDELRKVLAKKKSEYAKANILLRHVPKMQLIRYGGGLMVIKSAGELNNAQQLWLPYEEYCYFDDLSQGKGSLEKDDLKKLLDSILGSVQCLYPWHRFTEEELADLHVAFDKLPEDEKKNVITGIVSALHADAKTANLSIVGMTGSWRRMNNKSGYTFSDEDEFIFQSPSGLFEKRVTVGELKRKAKKEVNSKYRTNEKRLPTLSGASQP

SEQ ID NO: 176 - protein, 1092 aa, Ilyobacter polytropus
MKYSIGLDIGIASVGWSVINKDKERIEDMGVRIFQKAENPKDGSSLASSRREKRGSRRRNRRKKHRLDRIKNILCESGLVKKNEIEKIYKNAYLKSPWELRAKSLEAKISNKEIAQILLHIAKRRGFKSFRKTDRNADDTGKLLSGIQENKKIMEEKGYLTIGDMVAKDPKFNTHVRNKAGSYLFSFSRKLLEDEVRKIQAKQKELGNTHFTDDVLEKYIEVFNSQRNFDEGPSKPSPYYSEIGQIAKMIGNCTFESSEKRTAKNTWSGERFVFLQKLNNFRIVGLSGKRPLTEEERDIVEKEVYLKKEVRYEKLRKILYLKEEERFGDLNYSKDEKQDKKTEKTKFISLIGNYTIKKLNLSEKLKSEIEEDKSKLDKIIEILTFNKSDKTIESNLKKLELSREDIEILLSEEFSGTLNLSLKAIKKILPYLEKGLSYNEACEKADYDYKNNGIKFKRGELLPVVDKDLIANPVVLRAISQTRKVVNAIIRKYGTPHTIHVEVARDLAKSYDDRQTIIKENKKRELENEKTKKFISEEFGIKNVKGKLLLKYRLYQEQEGRCAYSRKELSLSEVILDESMTDIDHIIPYSRSMDDSYSNKVLVLSGENRKKSNLLPKEYFDRQGRDWDTFVLNVKAMKIHPRKKSNLLKEKFTREDNKDWKSRALNDTRYISRFVANYLENALEYRDDSPKKRVFMIPGQLTAQLRARWRLNKVRENGDLHHALDAAVVAVTDQKAINNISNISRYKELKNCKDVIPSIEYHADEETGEVYFEEVKDTRFPMPWSGFDLELQKRLESENPREEFYNLLSDKRYLGWFNYEEGFIEKLRPVFVSRMPNRGVKGQAHQETIRSSKKISNQIAVSKKPLNSIKLKDLEKMQGRDTDRKLYEALKNRLEEYDDKPEKAFAEPFYKPTNSGKRGPLVRGIKVEEKQNVGVYVNGGQASNGSMVRIDVFRKNGKFYTVPIYVHQTLLKELPNRAINGKPYKDWDLIDGSFEFLYSFYPNDLIEIEFGKSKSIKNDNKLTKTEIPEVNLSEVLGYYRGMDTSTGAATIDTQDGKIQMRIGIKTVKNIKKYQVDVLGNVYKVKREKRQTF

SEQ ID NO: 177 - protein, 994 aa, Streptococcus downei
MENQRGKRQRITHQEPYSIGLDIGTASVGSAVINNDLTVPQKRFKVRDINGNVIKTIKKNMSSVLIFDEANPAKGARTKRTSRRRYTRRNFRLLELKKLFEKEIEKIDPNFFHRIKEDSFFNWNDKEFDKHPLFGNLKEEKKFHNNYPTVFHLRNEIGKNSSKKFDLRLVYLALAHIIKYRGHFLDETFDPDASVSVEKRLNDFIVEYNELFDKDLRSEAKFSEILMSDSSNSVKIESTLSLYPSEKNTIFQVFLKLIVGNQGDFNKFFKDELESSSHSGKLVFSSDEVEDEKEELISIIGEDYLDIINLCQSLYSTVALAKIISTDTGESNTPLSASMVKRYNEHKGDLANLKGIVKHFIPEKYEEVFGEHSKTGYTAYIRNPNKMPEKKFYDYLYHEGEKGKISGILSDSRIYELPAVQKFILKIEQKSFLKKQRTKENGLIPYQLHLKELKIIIENQSEYYPFLHEIEEKLEKLLTFRIPYFVGPLAQTKYINPRFNWLVRKSEDHIKPWNFSEIVDEEKSATKFIEKLISNDQFLFGEKVLPKRSIIYQQFLIFNELTKVSYQIKDGPSRNFDSETKEEIFNSLFKKNKLGCVTVVDLKNYIKNDQCLSEKEDIQIEGIKKKFNSSYSTYADLSEISGLKELLDDDTQLDLVEEIIRILTVFEDKKMRTKQLEKLNLPANVDIEKLCKKHYKGWANVSRQLIDGIADRSRGFKKTILDYLKDDDIPNNDAFSTKVQKSLNRNFAQLITDKSLDFARKLDESYKIDVKKDYPSLVEDIPGSPAIRRAILQSLYTVDEIIGVMGRMPKNIVIEMARTNEVSDSPKTRKERIKKLIKETENDADALNFGISKVSEIFDEVKKDENLFKELEVYLYFLQEGKDMYGTETREGHRQPKEINFYDVKNSTGKYHIDHIIPQSLYSGNPLDNIVLTESTNNKIKDKDVPDEATVYEMKNFWLYLMKKGAISKKKFSFLTKIEQGGLSNEDKFGFINR

SEQ ID NO: 178 - protein, 1052 aa, Aminomonas paucivorans
MIGEHVRGGCLFDDHWTPNWGAFRLPNTVRTFTKAENPKDGSSLAEPRRQARGLRRRLRRKTQRLEDLRRLLAKEGVLSLSDLETLFRETPAKDPYQLRAEGLDRPLSFPEWVRVLYHITKHRGFQSNRRNPVEDGQERSRQEEEGKLLSGVGENERLLREGGYRTAGEMLARDPKFQDHRRNRAGDYSHTLSRSLLLEEARRLFQSQRTLGNPHASSNLEEAFLHLVAFQNPFASGEDIRNKAGHCSLEPDQIRAPRRSASAETFMLLQKTGNLRLIHRRTGEERPLTDKEREQIHLLAWKQEKVTHKTLRRHLEIPEEWLFTGLPYHRSGDKAEEKLFVHLAGIHEIRKALDKGPDPAVWDTLRSRRDLLDSIADTLTFYKNEDEILPRLESLGLSPENARALAPLSFSGTAHLSLSALGKLLPHLEEGKSYTQARADAGYAAPPPDRHPKLPPLEEADWRNPVVFRALTQTRKVVNALVRRYGPPWCIHLETARELSQPAKVRRRIETEQQANEKKKQQAEREFLDIVGTAPGPGDLLKMRLWREQGGFCPYCEEYLNPTRLAEPGYAEMDHILPYSRSLDNGWHNRVLVHGKDNRDKGNRTPFEAFGGDTARWDRLVAWVQASHLSAPKKRNLLREDFGEEAERELKDRNLTDTRFITKTAATLLRDRLTFHPEAPKDPVMTLNGRLTAFLRKQWGLHKNRKNGDLHHALDAAVLAVASRSFVYRLSSHNAAWGELPRGREAENGFSLPYPAFRSEVLARLCPTREEILLRLDQGGVGYDEAFRNGLRPVFVSRAPSRRLRGKAHMETLRSPKWKDHPEGPRTASRIPLKDLNLEKLERMVGKDRDRKLYEALRERLAAFGGNGKKAFVAPFRKPCRSGEGPLVRSLRIFDSGYSGVELRDGGEVYAVADHESMVRVDVYAKKNRFYLVPVYVADVARGIVKNRAIVAHKSEEEWDLVDGSFDFRFSLFPGDLVEIEKKDGAYLGYYKSCHRGDGRLLLDRHDRMPRESDCGTFYVSTRKDVLSMSKYQVDPLGEIRLVGSEKPPFVL

SEQ ID NO: 179 - protein, 1023 aa, Helicobacter cinaedi
MKIYSFDIGVASIGWAFIENEVLQDCGIRIFTKAENPKNGASLALPRREARGVRKRLARRRGRLNTIKQLLCKEFGLQLEDYLSNDGELPKAYTASKANPLKSPYELRTLALSQKLDSKDLVRVILHIAKHRGYGNKHAKDSKDTESGKVKKAIEFNRKTLAEKGYRSVGEYLYREFFQQSRISQNNGATEFINVRNKAGNYEHCVAQDMLKEELESILNAQRQFGFSLKQDFENKLLTKIFEQRPLKSFADKVGNCCFIAGEKRAPKDSPSAIEFIALSRTINTLINLSKESGEIYNRAIILQIVESTLKKGEISYKELREIIRLDERLRFKDPRLDYSREIKEAEKVKFLEFKQLKGFKKALGESFTTLAISQLDEIAEHIALIKDRVKLNEKLESYALTKEQREALSNLSFSAHINLSLQALKQILPFMRGDNGEQCLDYDESVEKAGLKALSKDTLKGQMLPPLNEFEPYLSNPVVARALAEYRKVLNVLLKQYGSPHKIHIEYAREAKLSSTERQKYEKEQKDNYAANQAAHKKCQELGLEPSSTNLLKLKLWQEQGGLCLYSGAKITISYLQDPTALQVDHIYPYSRSFDDSYMNKCLVLTKANQEKGNRTPFEAFGTDSAKWGVITTLAQKLPHKKRRRILNTAFNDKEAGFKLRNLNDTSYIARLVADYTETYLEFLPLVESENTTLSKGQKGSKKHIAIVNGVLTSTMRYYLGFASKDRDNHLHHALDAVIIGFMNDSVIKAFSDFKKTQETSKAAYYAHTLSKQEYKKQRAFIQLPSGENFRVSVLEKVESVFVSKPPRKRVRGALHEATFYSPNDPKLLKNYGGTKGVERALALGKMRKVGAKIVSNGAMVRVDIFRHKSSGKFYGVPVYTMDFALGILPNKAVVVGKDQNGVIKDWLEMDSSYEFIFSLYKDDVILVQKKEMQRPELCYFVSFDTSGASIKVAKHDNNFSTLTENQKLLFSNATKEEVVGKSIGIQNLKVFEKWQVSVLGEVKRTQSYPRENISLASKAKK

SEQ ID NO: 180 - protein, 874 aa, Listeria seeligeri
LANGQSEFSWLTRKADGEIRPWNIEEKVDFGKSAIDFIEKMTNKDTYLPKENVLPKHSMCYQKYMVYNELTKIRYTDDQGKTHYFSGQEKQQIFNDLFKQKRKVKKKDLELFLYNMNHVESPTVEGVEDAFNSSFTTYHDLQKVGVPQEILDDPLNTEMLEEIIKILTVFEDKRMINERLQEFSNVLDEAVLKKLERRHYTGWGRLSAKLLIGIRDKESHLTILDYLMNDDKHNRNLMQLINDSNLSFKSIIEKEQVSTADKDIQSIVADLAGSPAIKKGILQSLKIVDELVGIMGYPPQTIVVEMARENQTTGKGKNNSKPRFTSLEKAIKELGSQILKEHPTDNQGLKNDRLYLYYLQNGKDMYTGQELDIHNLSNYDIDHVVPQSFITDNSIDNRVLASSAANREKGDNVPSLEVVRKRKVYWEKLYQAKLMSKRKFDYLTKAERGGLTEADKARFIHRQLVETRQITKNVANILHQRFNCKKDESGNVIEQVRIVTLKAALVSQFRKQFQLYKVREVNDYHHAHDAYLNCVVANTLLKVYPQLEPEFVYGDYHQFDWFKANKATAKKQFYTNIMLFFAKKDRIIDENGEILWDKKYLDTIKKVLNYRQMNIVKKTEIQKGEFSNATANPKGNSSKLIPRKADWDPIKYGGFDGSNMAYAIVIEHEKRKKKTVIKKELIQINIMERTAFEKDQKEFLEGKGYRNPKVITKIPKYTLYECENGRRRMLGSANEAQKGNQMVLPNHLMTLLYHAKNCEASDGKSLAYIESHREMFAELLDSISEFASRYTLADANLEKINTIFEQNKSGDVKVIAQSFVNLLEFNAMGAPASFKYFETNIERKRYNNLKELLNATIIYQSITGLYEARKRLDD

SEQ ID NO: 181 - protein, 1082 aa, Neisseria lactamica
MAAFKPNPMNYILGLDIGIASVGWAMVEIDKEENPIRLIDLGVRVFERAEVPKTGDSLAMARRLARSVRRLTRRRAHRLLRARRLLKREGVLQDADFDENGLVKSLPNTPWQLRAAALDRKLTCLEWSAVLLHLIKHRGYLSQRKNEGETADKELGALLKGVADNAHALQTGDFRTPAELALNKFEKESGHIRNQRGDYSHTFSRKDLQAELNLLFEKQKEFSNPHVSDSLKEGIETLLMAQRPALSGDAVQKMLGHCTFEPAEPKAAKNTYTAERFIWLTKLNNLRILEQGSERPLTDTERATLMDEPYRKSKLTYAQARKLLGLEDTAFFKGLRYGKDNAEAPTLMEMKAYHAISRALEKEGLKDKKSPLNLSTELQDEIGTAFSLFKTDKDITGRLKDRVQPEILEALLKHISFDKFVQISLKALRRIVPLMEQGKRYDEACAEIYGDHYCKKNAEEKIYLPPIPADEIRNPVVLRALSQARKVINCVVRRYGSPARIHIETAREVGKSFKDRKEIEKRQEENRKDREKAAAKFREYFPNFVGEPKSKDILKLRLYEQQHGKCLYSGKEINLVRLNEKGYVEIDHALPFSRTWDDSFNNKVLVLGSENQNKGNQTPYEYFNGKDNSREWQEFKARVETSRFPRSKKQRILLQKFDEEGFKERNLNDTRYVNRFLCQFVADHILLTGKGKRRVFASNGQITNLLRGFWGLRKVRAENDRHHALDAVVVACSTVAMQQKITRFVRYKEMNAFDGKTIDKETGEVLHQKAHFPQPWEFFAQEVMIRVFGKPDGKPEFEEADTPEKLRTLLAEKLSSRPEAVHEYVTPLFVSRAPNRKMSGQGHMETVKSAKRLDEGISVLRVPLTQLKLKGLEKMVNREREPKLYDALKAQLETHKDNPAKAFAEPFYKYDKAGNRTQQVKAVRIEQVQKTGVWVRNHNGIADNATMVRVDVFEKGGKYYLVPIYSWQVAKGILPDRAVVAFKDEEDWTVMDDSFEFRFVLYANDLIKLTAKKNEFLGYFVSLNRATGAIDIRTHDTDSTKGKNGIFQSVGVKTALSFQKNQIDELGKEIRPCRLKKRPPVR

SEQ ID NO: 182 - protein, 1326 aa, Streptococcus pseudoporcinus
MLGTVLFDSGETAQARRLKRTNRRRYTRRRYRLCQLQNIFATEMVKVDDTFFQRLSESFFYYQDKAFDKHPIFGNSKEERAYHKTYPTIYHLRKDLADRDQKADLRLIYLALSHIIKFRGHFLIEGKLNSENTDVQKLFIALVTVYNLLFEEEPIAGETCDAKALLTAKTSKSKRLESLISEFPGQKKNGLFGNLLALALGLRPNFKSNFGLSEDAKLQITKDTYEEELDNLLAEIGDHYADLFLAAKNLSDAILLSDILTLSDENTRAPLSASMIKRYEEHQEDLALLKKLVKEQMPEKYWEIFSNAKKNGYAGYIEGKVSQEDFYRYIKPILSRLKGGDEFLAKIDRDDFLRKQRTFDNGSIPHQIHLKELHAILRRQEKYYPFLAEQKEKIEQLLCFRIPYYVGPLAKGGNSSFAWLKRRSDEPITPWNFKDVVDEEASAQAFIEGMTNYDTYLPEEKVLPKHSPLYEMFTVYNELTKVKYIAENMTKPLYLSAEQKEAIIDHLFKQTRKVTVKDLKEKYFSQIEGLENVDVTGVEGAFNASLGTYNDLLKIIKDKAFLDDEANAEILEEIVLILTLFQDEKLIEKRLAKYANLFEKSVLKKLRKRHYRGWGRLSRQLIDGMKDKASGKTILDFLKADDFANRNFIQLINDSSLDFEKLIDDAQKKAIKRESLTEAVANLAGSPAIKKGILQSLKVVDEIVKVMGHNPDNIVIEMSRENQTTAQGLKNARQRLKKIKEVHKKTGSRILEDNSERITNLTLQDNRLYLYLLQDGKDMYTGQDLDINNLSQYDIDHIIPQSFIKDNSIDNLVLTTQKANRGKSDNVPSIEVVRDMKDRVWRRQLANGAISRQKFDHLTKAERGGLADSDKARFLRRQLVETRQITKHVAQLLDSRFNSKSNQNKKLARNVKIITLKSKIVSDFRKDFGLYKLREVNNYHHAHDAYLNAVVGTALLKKYPKLEAEFVYGDYKHFDLVKLISKSDPSLGKATAKVFFYSNIMNFFKEELSLADGTLMKRPVIETNTETGEVVWDKVKDFKTIRKVLSYPQVNIVKKTEIQSGAFSKESVLSKGNSDKLIERKKGWDPKKYGGFDSPNTAYSIFVVAKVAKRKAQKLKTVKEIVGITIMEQAEYEKDNIAFLEKKGYQDIQEKLLIKLPKYSLFELENGRRRLLASANEFQKGNELALSGKYMKFLYLASRYDKLSSKIESEQQKKLFVEQHLHYFDEILDIVVKHATCYIKAENNLKKIISLYKKKEAYSINEQALNMLNLFIFTSLGAPSTFVFFDETIDRKRYTTSSDVLNGILIQQSITGLYETRIDLSRFGGD

SEQ ID NO: 183 - protein, 1150 aa, Enterococcus faecalis
MYSIGLDLGISSVGWSVIDERTGNVIDLGVRLFSAKNSEKNLERRTNRGGRRLIRRKTNRLKDAKKILAAVGFYEDKSLKNSCPYQLRVKGLTEPLSRGEIYKVTLHILKKRGISYLDEVDTEAAKESQDYKEQVRKNAQLLTKYTPGQIQLQRLKENNRVKTGINAQGNYQLNVFKVSAYANELATILKTQQAFYPNELTDDWIALFVQPGIAEEAGLIYRKRPYYHGPGNEANNSPYGRWSDFQKTGEPATNIFDKLIGKDFQGELRASGLSLSAQQYNLLNDLTNLKIDGEVPLSSEQKEYILTELMTKEFTRFGVNDVVKLLGVKKERLSGWRLDKKGKPEIHTLKGYRNWRKIFAEAGIDLATLPTETIDCLAKVLTLNTEREGIENTLAFELPELSESVKLLVLDRYKELSQSISTQSWHRFSLKTLHLLIPELMNATSEQNTLLEQFQLKSDVRKRYSEYKKLPTKDVLAEIYNPTVNKTVSQAFKVIDALLVKYGKEQIRYITIEMPRDDNEEDEKKRIKELHAKNSQRKNDSQSYFMQKSGWSQEKFQTTIQKNRRFLAKLLYYYEQDGICAYTGLPISPELLVSDSTEIDHIIPISISLDDSINNKVLVLSKANQVKGQQTPYDAWMDGSFKKINGKFSNWDDYQKWVESRHFSHKKENNLLETRNIFDSEQVEKFLARNLNDTRYASRLVLNTLQSFFTNQETKVRVVNGSFTHTLRKKWGADLDKTRETHHHHAVDATLCAVTSFVKVSRYHYAVKEETGEKVMREIDFETGEIVNEMSYWEFKKSKKYERKTYQVKWPNFREQLKPVNLHPRIKFSHQVDRKANRKLSDATIYSVREKTEVKTLKSGKQKITTDEYTIGKIKDIYTLDGWEAFKKKQDKLLMKDLDEKTYERLLSIAETTPDFQEVEEKNGKVKRVKRSPFAVYCEENDIPAIQKYAKKNNGPLIRSLKYYDGKLNKHINITKDSQGRPVEKTKNGRKVTLQSLKPYRYDIYQDLETKAYYTVQLYYSDLRFVEGKYGITEKEYMKKVAEQTKGQVVRFCFSLQKNDGLEIEWKDSQRYDVRFYNFQSANSINFKGLEQEMMPAENQFKQKPYNNGAINLNIAKYGKEGKKLRKFNTDILGKKHYLFYEKEPKNIIK

SEQ ID NO: 184 - protein, 1150 aa, Enterococcus faecalis
MYSIGLDLGVSSVGWSVIDERTGNVIDLGVRLFSAKNSEKNLERRTNRGGRRLIRRKTNRLKDAKKILAAVGFYEDKSLKNSCPYQLRVKGLTEPLSKGEIYKVTLHILKKRGISYLDEDDTEAAKESQDYKEQVRENAQLLTKYTPGQIQLQRLKENNRVKTGINAQGNYQLNVFKVSAYANELATILKTQQAFYPNELTDDWIALFVQPGIAEEAGLIYRKRPYYHGPGNEANNSPYGRWSDFKKTGQPATNIFDKLIGKDFQGELRASGLSLSAQQYNLLNDLTNLKIDGEIPLSPEQKEYILAELMTKEFTRFGINDVAKLLGVKKERLSGWRLDKKGKPEIHTLKGYRNWRKIFAESGIDLATLPTETIDCLAKVLTLNTEREGIENTLAFELPELAESVKLLVLDRYKELSQSVSTQAWHRFSLKTLHLLIPELMNATSEQNTLLEQFQLKSDVRKRYSEYKKLPTKDVLTEIYNPTVNKTVSQAFKVIDALLVKYGKEQIRYITIEMPRDDNEEDEKKRIKELHAKNSQRKNDSQSYFMQKSGWSQEKFQTTIQKNRRFLAKLLYYYEQDGICAYTGLSISPELLVSDSTEIDHIIPISISLDDSINNKVLVLSKANQVKGQQTPYDAWMDGSFKKINGKFSNWDDYQKWVESRHFSHKKENNLLETRNIFDSEQVEKFLARNLNDTRYASRLVLNTLQSFFANQETKVRVVNGSFTHTLRKKWGADLDKTRETHHHHAVDATLCAVTPFVKVSRYHYAVKEETGEKVMREIDFETGEIVDEMSYREFKKSKKYERKTYQVKWPNFREQLKPVNLHPRIKFSHQVDRKANRKLSDATIYSVREKTEVKTLKSGKQKITTDEYTIGKIKDIYTVDGWEAFKKKQDKLLMKDLDEKTYERLLSIAETTPDFQEVEEKNGKVKRVKRSPFAVYCEENDIPAIRKYAKNNNGPLIRSLKYYDGKLNKHINITKDSQGRPVEKTKNGRKVTLQSLKPYRYDIYQDLETKAYYTVQLYYSDLRFVEGKYGITEKEYMKKVAEQTKGQVVRFCFSLQKNDGLEIEWKDSQCYDVRFYNFQSANSINFKGLEQEMMPAENQFKQKPYNNGAINLNIAKYGKEGKKLRKFNTDILGKKHYLYYEKEPKNIIK

SEQ ID NO: 185 - protein, 1345 aa, Streptococcus anginosus
MDQKYSIGLDIGTNSVGWAVVTDDYKVPAKKMKVLGNTDKQSIKKNLLGALLFDSGETAEATRLKRTARRRYTRRRNRLRYLQEIFAEEMNKVDENFFQRLDDSFLVDEDKRGERHPIFGNIAAEVKYHDDFPTIYHLRKHLADISQKADLRLVYLALAHMIKFRGHFLIEGQLKAENTNVQALFKDFVEVYDKTVEESHLSEMTVDALSILTEKVSKSRRLENLIAHYPAEKKNTLFGNLIALSLGLQPNFKTNFQLSEDAKLQFSKDTYEEDLEGLLGEIGDEYADLFASAKNLYDAILLSGILTVDDNSTKAPLSASMVKRYEEHQKDLKKLKDFIKVNAPDQYNAIFKDKNKKGYAGYIENGVKQDEFYKYLKGILLQINGSGDFLDKIDREDFLRKQRTFDNGSIPHQIHLQEMHAILRRQEEHYPFLKENQDKIEKILTFRIPYYVGPLARKGSRFAWAEYKADEKITPWNFDDILDKEKSAEKFITRMTLNDLYLPEEKVLPKHSLLYETFTVYNELTKVKYVNEQGEAKFFDANMKQEIFDHVFKENRKVTKDKLLNYLNKEFEEFRIVNLTGLDKENKAFNSSLGTYHDLRKILDKSFLDDKANEKTIEDIIQTLTLFEDREMIRQRLQKYSDIFTKAQLKKLERRHYTGWGRLSYKLINGIRNKENKKTILDYLIDDGYANRNFMQLINDDALSFKEEIARAQIIGDVDDIANVVHDLPGSPAIKKGILQSVKIVDELVKVMGHNPANIIIEMARENQMTDKGRRNSQQRLKLLQDSLKNLDNPVNIKNVENQQLQNDRLFLYYIQNGKDMYTGETLDINNLSQYDIDHIIPQAFIKDNSLDNRVLTRSDKNRGKSDDVPSIEVVHEMKSFWSKLLSVKLITQRKFDNLTKAERGGLTEEDKAGFIKRQLVETRQITKHVAQILDERFNTEFDGNKRRIRNVKIITLKSNLVSNFRKEFELYKVREINDYHHAHDAYLNAVVGNALLLKYPQLEPEFVYGEYPKYNSYRSRKSATEKFLFYSNILRFFKKEDIQTNEDGEIAWNKEKHIKILRKVLSYPQVNIVKKTEEQTGGFSKESILPKGESDKLIPRKTKNSYWNPKKYGGFDSPVVAYSILVFADVEKGKSKKLRKVQDMVGITIMEKKRFEKHPVDFLEQRGYRNVRLEKIIKLPKYSLFELENKRRRLLASARELQKGNELVIPQRFTTLLYHSYQIEKNYEPEHREYVEKHKDEFKELLEYISVFSRKYVLADNNLTKIEMLFSKNKDAEVSSLAKSFISLLTFTAFGAPAAFNFFGENIDRKRYTSVTECLNATLIHQSITGLYETRIDLSKLGED

SEQ ID NO: 186 - protein, 849 aa, Listeria ivanovii
  misc_feature (780)..(780): Xaa can be any naturally occurring amino acid
LIDKNGTPQHITMIDKMRGKCTYFPEEVRIAKMSYTAELFGLLNDFNNIYFADPETGEKIGFTEADKKYFIDTFIHDQKGVKNITLKQIMKHKNIINETDIFGYRINTKNGTPIFTEFKGLKALKKALKEVDLPDEFYQNTEMMDEIANILSSEKSFTRREEQLKELFLAAFNDELEEAVKELINDITFKEFHSLSKKAIMVILPELWSTNQNQMQLFVQHKMDKSRLENLQNGTKIQFDDEAILSTIAKRAHRETIKIVDAVRAKYGELDYVIVEMAREKNSDEQKKVYNRAQKKQGDFEKEMCKLLGVSELKELRLNGKQHLALKFWKEQDGKCIYSGKPIALSDIVNNFNGLLEIDHIIPISISYDDSQQNKVLCLRSENQRKGQLSPYQYLIRGMGERSFDAFKAEVLSRHFGKKKQNYLLEMEDIANNDELRKHFINRNLVDTRYAMRTFSNTLKTFYTVNGIPTKVMPVNGAMTSALRKRAKLNKDRDAGHAHHAIDALIVAAIGRLPLIKQLAELRVNEEGEFADKITDKGLDDKTAFDDKTLKFLRNLLNYESKVKYSHKVDRKPNRSLSKQTLYSTREKDGEKYIIGKVKNIYTLDKAGYAALKKRIDKNPEDFLMAQHNPKTWEEIIKIMEVYSKADNPFKEFYDEHGFIMKDGKVPVKSLRYHDKKLGIHVPLTHKYENTRHDVVLLKRNSLRVDIYMNKEGVYKYQGVPYNWFNQKGDKYILDMEKYHNEIDGTRASFKNIDNTFEFQFSLYKNDVFSYMKKDKEGEXVSYTKLFRSDSSPRENRLEVENIDMRTSSQQMPTINPLKNLIKYNTDILGNTYPIQKEKFVTVFTLHSK

SEQ ID NO: 187 - protein, 1457 aa, Prevotella buccae
MKTILGLDLGTNSIGWAKVSVDDYGNYLHDIKLGSRIIPMSQDVLGNFDSGVTVSQTAQRTEFRSKRRLVQRNLQRRERLHRVLHVLDFLPAHYDAAIGWDRTEAVTYGKFLNHAEPKLAWEELGNGKRRFLFMDSFHEMVADFARCQPALVADGKKIPLDWTIYYLRKKALTQAITKEELAWILLNFNQKRGYYQLRGEEEEENPTKQEEYYELKVVSVEATDSRKGNDTWYNVHLENGWIYRRSSKISLDDWVGKVKQFIVTTEYEKDGATLKTDKEGYVKRSFRAPNENDWGLRKKRTETLLEMSGKTVGAFIYDHLLQEPADKIRGNFIRTIERHYYKAELEAILAEQCKYHIELRDKEMLEACARELYLNNLPHQRSLMKKDMTYLLLYDLIFYQRPLKSKKALIANCPYEYYEYVDKETGEIKRQNIKCIAKSNPYFQEFRLWQFVLNLRLFDRVEDKEVTANYLPTADDHARLFTYLNDRKEINQETLLKDYFKLKKVKIGNEKEYPIRWNYIEDKEKKYPCNETRYELLMALDRAGIEHKWLDDNNLEYRLWHLLYSVEVKSESETALRKLKNDDAFVNSFLKVKPFKKEYGAYSEKAIKRLLAVMRKGFLWNEQDICDETRKRIEIIIKGDVDEKVKERMGHAAYSFDRVSDFQGLPEWLACYVVYGRHSEAMDIQHWDSPERLMAYINNFKQYSLRNPIVEQCILETLRTVHDIWKETGQIDEIHVELGREMKSTSEERARRTQNVLRNENTNLRIKSLLIELKNDTDICNVHPYSPMQQEILRIYEEGALQELNREDEDFEEISKISQMSQPSGKELNRYKLWLEQKYRSPYTGKAISLAKLFTPAYQIEHVIPQSRYFDDSFTNKVICEAEVNTLKSNLLGYEFIKKHGGEIIHCTTLGDVRIFSESEYKAFVMDHYANNKSKKDKLLMEDIPQEFLSRQMNDSRYISKVVKTLLSNIVRMADESEATSKSVIVCTGGVTDRLKKDWGLNDVWNSIVYSRFERLNRLTGTEAFGHWENKDGKRVFQTSMPLELQRGFRKKRIDHRHHAMDALVIACASRNIVNYLNNESANNPKKREDLRRQLCDKNRVIRKPWETFTQDAYNALENVVVSFKNYVRVINKATNRYEHYDENGKKRFVQQKGSELWAIRKPMHKETYYGHVNLRRKELVTLQKALDDIPSICDKKLRDYISALVEKHFNKRQLLAHFKSTDYYWQKQYVNKVYVWTFSDDIKPLVATRKLLDTSFDAKRIGTITDTGIQKILRNYLEAKGGNATLAFTPEGIAEMNQNISKYNDGKPHQPILKVRITEPMGAKYRVGQTGNKMAKYVEAQSGTNLYFAIYEDSEGKRSYTTVPLDEVAERLKQRLSPVPEKDENDVPLKFYLSPNDLVYVPTEEELQLRECKLNKDRIYKMVSSTGNECHFIPYYVANVIYNKGGFNMQMHRPQS

SEQ ID NO: 188 - protein, 1330 aa, Enterococcus italicus
MKNDYTIGLDIGTNSVGYSVVTDDYKVISKKMNVFGNTEKKSIKKNFWGVRLFESGQTAQEARMKRTSRRRIARRKNRICYLQEIFQPEMNHLDNNFFYRLNESFLVADDAKYDKHPIFGTLDEEIHFHEQFPTIYHLRKYLADGDEKADLRLVYLAIAHIIKFRGNFLIEGELNTENNSVIELSKVFVQLYNQTLSELEGFQFIDESIDFSEVLTQQLSKSERADNVLKLFPDEKGTGIFAQFIKLIVGNQGNFKKVFQLEEDQKLQLSTDDYEENIENLLAIIGDEYGDIFVAAQNLYQAILLAGILTSTEKTRAKLSASMIQRYEEHAKDLKLLKRFVKEHIPDKYAEIFNDATKNGYAGYIDGKTKEEEFYKYLKTTLVQKSGYQYFIEKIEQENFLRKQRIYDNGVIPHQVHAEELRAILRKQEKYYSFLKENHEKIEQIFKVRIPYYVGPLAKHNEQSRFAWNIRKSDEPIRPWNMNDVVDENASAVAFIERMTIKDIYLNENVLPRHSLIYEKFTVFNELTKVLYADDRGVFQRFSAEEKEDIFEKLFKSERKVTKKKLENYLRIELSISSPSVKGIEEQFNANFGTYLDLKKFDELHPYLDDEKYQDTLEEVIKVLTVFEDRSMIQNQLEQLPLNLSTKTIKALSRRKYTGWGRLSARLIDGIHDKNSGKTILDYLIEDESDSYIVNRNFMQLINDDHLSFKKIIEDSQPYKEQQSAEEIVSELSGSPAIKKGILQSLKIVDELVAIMGYKPKNIVVEMARENQTTGRGKQNSKPRLKGIENGLKEFSDSVLKGSSIDNKQLQNDRLYLYYLQNGKDMYTGHELDIDHLSTYDIDHIIPQSFLTDNSIDNRVLTTSKSNRGKSDNVPSEEVVRKMDRFWRKLLNAKLISERKYTNLTKKELTESDKAGFLKRQLVETRQITKHVATILDSKFNEDSNNRDVQIITLKSALVSEFRKTFNLYKVREINDLHHAHDAYLNAVVALSLLRVYPQLKPEFVYGEYGKNSIHDQNKATIKKQFYSNITRYFASKDYIINDDGEILWNKQETIAQVIKTLGMHQVNVVKKVEIQKGGFSKESIQPKGESQKLIRRKQQWNTKKYGGFDSPVVAYAILLSFDKGKRKARSFKIVGITIQDRESFEGNPILYLSKKDYHNPKVEAILPKYSLFEFENGRRRMVASASETQKGNQLIIPGHLMELLYHSKKIINGKNSDSVSYIQNNKEKFREIFEYIVDFSSKYISADANLNKIEKIFENNFHKASEQEIAKSFINLLTFTAMGAPADFEFFGEKIPRKRYVSISEIIDAVFIHQSITGLYETRVRLTEV

SEQ ID NO: 189 - protein, 1123 aa, Mobiluncus curtisii
MFVYLNSPRGFGPATFLTDLPHFCIIFGNNDFMDNRKYHVGIDVGTNSVGFAAVEVGDSGSPIRFLNTMVVIHDSGVDPEQKKYAITRLASAGTARRTRRLYRTRRQRLRELDDFISNELGYPLVNLENFADPYEPWKVRADLATIKLPADELPEAMSIALRHMARHRGWRSPYQRVEALHLHAEISEEFSALKKRVMEKTGDVFSDDATPAEVLVDLMGRQKIRGADGMLSGKLRQSDNANELRKIASVQGIDDETLNRIIDRVFFSRSPKGKASERVGMDALPGQGSKPRALKAMPSFQKFRIVSVICNLRIKDSGDDNRPLSMEEKEQLIGYLMSSTTDDHVTWTDVAELLHVKRSNLQGTAKEGPDGERPYTRPPVNSAWSKIKDSKIKSLVALWKTGDVDVQSAIVEALSNASVLEDARPGADIVVAYLESLDDKELESLDKVGLPAGRASYSEDSLERLTERMLQDDCDLFEARKREFGVSDDWKPPADPIYAPVGNPGVDRVLKIVNRLLMAAEREWGAPTQINIEHVRSGFSSELMQREFERENERRRAQNEEAVKAILTEKGGNSHVSKYDIIRYYAVKRQNCQCLYCGTPITFSDCELDHIVPRKGVGSTNSRVNLAAACRSCNRDKSNLPFAVWAGKTSNFDVSIDGAVSRVKQWQRSQNEGAREFRAFQNEVISRLLKTTEDPEIDSRSLESVAWMARELHHRVEYYFQSKGAQTQVSVYRGAVTAQARKSSGLEDKVKMIGGGGKTRLDRRHHAMDAATIALMTPGISTTLSEKNNLRDAQKFTGQSETWKDYCGRTETAREHFAVWKSNMERLTDLFNDKLENDAIPVVQPLRLRLSDSKAHDDGIGKLDSKKLGSVWSLADIDRAATPQIWTALTRCDDFDPTKGLPENANRVIRAQGVKYESEDNIPVFPSNVAAIAVRDGYAEIGSTIHHARIYRIDDGKKIFYSMIRVFAVDLLKHQAEDLFTVKLPPSAISIRTCEDSLRRALSNGTAEYLGWLVPGDEIIVDTSDKAFHTGQIGDLLRNFPVNSFRLTGFPSNSRLRLKPVLLAGEGLRDDAEDSIKKILSGQGWRPAINVLFSKGKPRIVRRNSLGIERPSSNNGLPFSWEA

SEQ ID NO: 190 - protein, 1054 aa, Staphylococcus lugdunensis
MNQKFILGLDIGITSVGYGLIDYETKNIIDAGVRLFPEANVENNEGRRSKRGSRRLKRRRIHRLERVKKLLEDYNLLDQSQIPQSTNPYAIRVKGLSEALSKDELVIALLHIAKRRGIHKIDVIDSNDDVGNELSTKEQLNKNSKLLKDKFVCQIQLERMNEGQVRGEKNRFKTADIIKEIIQLLNVQKNFHQLDENFINKYIELVEMRREYFEGPGKGSPYGWEGDPKAWYETLMGHCTYFPDELRSVKYAYSADLFNALNDLNNLVIQRDGLSKLEYHEKYHIIENVFKQKKKPTLKQIANEINVNPEDIKGYRITKSGKPQFTEFKLYHDLKSVLFDQSILENEDVLDQIAEILTIYQDKDSIKSKLTELDILLNEEDKENIAQLTGYTGTHRLSLKCIRLVLEEQWYSSRNQMEIFTHLNIKPKKINLTAANKIPKAMIDEFILSPVVKRTFGQAINLINKIIEKYGVPEDIIIELARENNSKDKQKFINEMQKKNENTRKRINEIIGKYGNQNAKRLVEKIRLHDEQEGKCLYSLESIPLEDLLNNPNHYEVDHIIPRSVSFDNSYHNKVLVKQSENSKKSNLTPYQYFNSGKSKLSYNQFKQHILNLSKSQDRISKKKKEYLLEERDINKFEVQKEFINRNLVDTRYATRELTNYLKAYFSANNMNVKVKTINGSFTDYLRKVWKFKKERNHGYKHHAEDALIIANADFLFKENKKLKAVNSVLEKPEIESKQLDIQVDSEDNYSEMFIIPKQVQDIKDFRNFKYSHRVDKKPNRQLINDTLYSTRKKDNSTYIVQTIKDIYAKDNTTLKKQFDKSPEKFLMYQHDPRTFEKLEVIMKQYANEKNPLAKYHEETGEYLTKYSKKNNGPIVKSLKYIGNKLGSHLDVTHQFKSSTKKLVKLSIKPYRFDVYLTDKGYKFITISYLDVLKKDNYYYIPEQKYDKLKLGKAIDKNAKFIASFYKNDLIKLDGEIYKIIGVNSDTRNMIELDLPDIRYKEYCELNNIKGEPRIKKTIGKKVNSIEKLTTDVLGNVFTNTQYTKPQLLFKRGN

SEQ ID NO: 191 - protein, 586 aa, Pseudoramibacter alactolyticus
MTYYLGLDMGTGSVGWAATDKNYKLIRAKGKDLWGVRLFQTAKTAAERRSHRVARLRRQREKVRIGYLKTIFSDAINKVDPGFFQRLDDSFFYAEDKNINQPYALFADTGYTDVDYYRDYPTIFHLRSTLIHDTSPKDVRLVYLAVLNMFKHRGHFLASNLSENGVDDFGDIYQQWCKSVPKPVQISDPEAKTEKIENILSKAGISNTRRLEALLEVFGIKRRDAFAEVLKLWCGLKGNLSKIWSETDFSDLDNTKPALSFKDSNLDMVLSQLEEILPDEDYSWLMLTKQIYDWSLLSGMMKDASGKSYDYLSDARVASYQKHSEDLKTLKRFYHDNHLSAAYDQMFRVMGKDNYSAYAGSVQSKKEVVRRGASCGIEELYKRIKKDLKPVPDCETKQIILENIERGTFLPKQLTRDNGVIPNQIHVHELKAILKNAENYLPFLKEGSELTNSEKILQLFQFQIPYYVGPLYSDENNYAWVVRKEGGRVFPWNFAEKVDEKASAEGFISELVARCTYLDNEKVLPKASLLYEKFMVLNELNNLRINGERISVDIKQELYQNLFTRGKKVTLKKSEGLFGGQRIFCL

SEQ ID NO: 192 - protein, 1385 aa, Gemella morbillorum
MKNKTWYLGLGVGPTSIGWAATDSNYKLLRKNKKRLWGVRLFEEAKTAVDRRTFRAERRRLARRKWRISLLEELFAKEVSKNDPNFFLRLKESKYHFEDKSLMNEYILFNDKDYTDKDYYKEYPTIYHLRLSLTTEENPDIRKVYLAVHSMLKNRGHFLLQGQSFNDSNIDSVIKELLELETVKINFEVTDEVIHSLKKIALEKKNLSDKNNDVKKLYPKEKQLQEIFKLVFGGKTSLDKLYDIEEYKELDNSVKSISFKEKVYEEVRPDYEQILSNYIELLDLAKLVYDSIVLADIKKEGKTISESKVELYNKHKDDLANLKKLVKIDSKLSEDKKKEVYFTIFKEDKEKGTNYVNYTHRSQEGKSCSYEDFKKFLKKELEKLEDSPTKTTILEELDLETFLPLQRTKDNSVVPYQIHKEELVKILDNAAKYHSFLAEKDDSGYSTREKVVQLFEFRIPYYIGPLNAHHNTENGGYSWAIRKKGMESVPVTPWNFKDVIDESASAEAFVNNLKNKCAYLSGEDVLPKNSLLYSEYALLNELNALRYEGNRISVEARDVIVTKLFKEQGKKVTKKTIKELLKTEGFIDGKGEIVGIDNIVKNDLKSYRDFKKILADKFDKERVENIILWITLYGESRKLIKEKITKVYGDFYTVDEIEKMSRLTYKDWGILSRKLLTELVSEKLYNEETGECLNIIGAMRQGTILFMELLADKFDYMSQIKNHNKENKDDITEITPDILENLHASPAVKRSIWQTVRIVEELKTIIGCVPTKIFIETTKRNNAPYKVPTLNRNDLVTKYKTIREHEIFELEKELKNTLDFTLNKNRLINEEPSKLKATKLYLYYTQLGRCMYTGKKIDLGELFDNNNKYDIDHIYPQSKVKDGSFNNIVLVTKASNDMKADVFPLKSKFQTKENKIFWRFLKEKKLITEEKYNRLVRTEEFSNGELTGFITRQLVETSQAIKVISNVLRELNPETTICYSKAENVSSFRQSFGKIKEANRKAENNEKLIRVQEINDYYNAKDAYLSIVVGNVYDVKFTRNVHNFIKNNKDARRYSLNGLFYTDVKNANTIAWEMDKTVHVVEKTMNNNNILITRRTSEQKGALYDATLYKAKVAEKAKEGTYYPLKTTDSKIKDVGKYGGFTKIKIAYYSIFEYTLDGKKGKQKITRIVPIPIYISQNIKDDKALLEYAQTRLPGKDLKIKYRKLCIGSLVKINNFNYYIGGKTNNNFTFDSAVQVILDKDSESYIKELAKYLNWKKENKDGKLWESITEDKNIQLYDSLVKKMNTGIFIRKTPNKYTELLTLEVKNKFINIDIDEQVKLLLEILNLLTNKKFTSKLNEIGITASRGVCSFNLSNQSQFSIIEQSVTGVYEKEKLIIEKKKEGIL

SEQ ID NO: 193 - protein, 1029 aa, Alicycliphilus denitrificans
MRSLRYRLALDLGSTSLGWALFRLDACNRPTAVIKAGVRIFSDGRNPKDGSSLAVTRRAARAMRRRRDRLLKRKTRMQAKLVEHGFFPADAGKRKALEQLNPYALRAKGLQEALLPGEFARALFHINQRRGFKSNRKTDKKDNDSGVLKKAIGQLRQQMAEQGSRTVGEYLWTRLQQGQGVRARYREKPYTTEEGKKRIDKSYDLYIDRAMIEQEFDALWAAQAAFNPTLFHEAARADLKDTLLHQRPLRPVKPGRCTLLPEEERAPLALPSTQRFRIHQEVNHLRLLDENLREVALTLAQRDAVVTALETKAKLSFEQIRKLLKLSGSVQFNLEDAKRTELKGNATSAALARKELFGAAWSGFDEALQDEIVWQLVTEEGEGALIAWLQTHTGVDEARAQAIVDVSLPEGYGNLSRKALARIVPALRAAVITYDKAVQAAGFDHHSQLGFEYDASEVEDLVHPETGEIRSVFKQLPYYGKALQRHVAFGSGKPEDPDEKRYGKIANPTVHIGLNQVRMVVNALIRRYGRPTEVVIELARDLKQSREQKVEAQRRQADNQRRNARIRRSIAEVLGIGEERVRGSDIQKWICWEELSFDAADRRCPYSGVQISAAMLLSDEVEVEHILPFSKTLDDSLNNRTVAMRQANRIKRNRTPWDARAEFEAQGWSYEDILQRAERMPLRKRYRFAPDGYERWLGDDKDFLARALNDTRYLSRVAAEYLRLVCPGTRVIPGQLTALLRGKFGLNDVLGLDGEKNRNDHRHHAVDACVIGVTDQGLMQRFATASAQARGDGLTRLVDGMPMPWPTYRDHVERAVRHIWVSHRPDHGFEGAMMEETSYGIRKDGSIKQRRKADGSAGREISNLIRIHEATQPLRHGVSADGQPLAYKGYVGGSNYCIEITVNDKGKWEGEVISTFRAYGVVRAGGMGRLRNPHEGQNGRKLIMRLVIGDSVRLEVDGAERTMRIVKISGSNGQIFMAPIHEANVDARNTDKQDAFTYTSKYAGSLQKAKTRRVTISPIGEVRDPGFKG

SEQ ID NO: 194 - protein, 1422 aa, Sutterella wadsworthensis
MTQSERRFSCSIGIDMGAKYTGVFYALFDREELPTNLNSKAMTLVMPETGPRYVQAQRTAVRHRLRGQKRYTLARKLAFLVVDDMIKKQEKRLTDEEWKRGREALSGLLKRRGYSRPNADGEDLTPLENVRADVFAAHPAFSTYFSEVRSLAEQWEEFTANISNVEKFLGDPNIPADKEFIEFAVAEGLIDKTEKKAYQSALSTLRANANVLTGLRQMGHKPRSEYFKAIEADLKKDSRLAKINEAFGGAERLARLLGNLSNLQLRAERWYFNAPDIMKDRGWEPDRFKKTLVRAFKFFHPAKDQNKQHLELIKQIENSEDIIETLCTLDPNRTIPPYEDQNNRRPPLDQTLLLSPEKLTRQYGEIWKTWSARLTSAEPTLAPAAEILERSTDRKSRVAVNGHEPLPTLAYQLSYALQRAFDRSKALDPYALRALAAGSKSNKLTSARTALENCIGGQNVKTFLDCARRYYREADDAKVGLWFDNADGLLERSDLHPPMKKKILPLLVANILQTDETTGQKFLDEIWRKQIKGRETVASRCARIETVRKSFGGGFNIAYNTAQYREVNKLPRNAQDKELLTIRDRVAETADFIAANLGLSDEQKRKFANPFSLAQFYTLIETEVSGFSATTLAVHLENAWRMTIKDAVINGETVRAAQCSRLPAETARPFDGLVRRLVDRQAWEIAKRVSTDIQSKVDFSNGIVDVSIFVEENKFEFSASVADLKKNKRVKDKMLSEAEKLETRWLIKNERIKKASRGTCPYTGDRLAEGGEIDHILPRSLIKDARGIVFNAEPNLIYASSRGNQLKKNQRYSLSDLKANYRNEIFKTSNIAAITAEIEDVVTKLQQTHRLKFFDLLNEHEQDCVRHALFLDDGSEARDAVLELLATQRRTRVNGTQIWMIKNLANKIREELQNWCKTTNNRLHFQAAATNVSDAKNLRLKLAQNQPDFEKPDIQPIASHSIDALCSFAVGSADAERDQNGFDYLDGKTVLGLYPQSCEVIHLQAKPQEEKSHFDSVAIFKEGIYAEQFLPIFTLNEKIWIGYETLNAKGERCGAIEVSGKQPKELLEMLAPFFNKPVGDLSAHATYRILKKPAYEFLAKAALQPLSAEEKRLAALLDALRYCTSRKSLMSLFMAANGKSLKKREDVLKPKLFQLKVELKGEKSFKLNGSLTLPVKQDWLRICDSPELADAFGKPCSADELTSKLARIWKRPVMRDLAHAPVRREFSLPAIDNPSGGFRIRRTNLFGNELYQVHAINAKKYRGFASAGSNVDWSKGILFNELQHENLTECGGRFITSADVTPMSEWRKVVAEDNLSIWIAPGTEGRRYVRVETTFIQASHWFEQSVENWAITSPLSLPASFKVDKPAEFQKAVGTELSELLGQPRSEIFIENVGNAKHIRFWYIVVSSNKKMNESYNNVSKS

SEQ ID NO: 195 - protein, 1132 aa, Nitratifractor salsuginis
MKKILGVDLGITSFGYAILQETGKDLYRCLDNSVVMRNNPYDEKSGESSQSIRSTQKSMRRLIEKRKKRIRCVAQTMERYGILDYSETMKINDPKNNPIKNRWQLRAVDAWKRPLSPQELFAIFAHMAKHRGYKSIATEDLIYELELELGLNDPEKESEKKADERRQVYNALRHLEELRKKYGGETIAQTIHRAVEAGDLRSYRNHDDYEKMIRREDIEEEIEKVLLRQAELGALGLPEEQVSELIDELKACITDQEMPTIDESLFGKCTFYKDELAAPAYSYLYDLYRLYKKLADLNIDGYEVTQEDREKVIEWVEKKIAQGKNLKKITHKDLRKILGLAPEQKIFGVEDERIVKGKKEPRTFVPFFFLADIAKFKELFASIQKHPDALQIFRELAEILQRSKTPQEALDRLRALMAGKGIDTDDRELLELFKNKRSGTRELSHRYILEALPLFLEGYDEKEVQRILGFDDREDYSRYPKSLRHLHLREGNLFEKEENPINNHAVKSLASWALGLIADLSWRYGPFDEIILETTRDALPEKIRKEIDKAMREREKALDKIIGKYKKEFPSIDKRLARKIQLWERQKGLDLYSGKVINLSQLLDGSADIEHIVPQSLGGLSTDYNTIVTLKSVNAAKGNRLPGDWLAGNPDYRERIGMLSEKGLIDWKKRKNLLAQSLDEIYTENTHSKGIRATSYLEALVAQVLKRYYPFPDPELRKNGIGVRMIPGKVTSKTRSLLGIKSKSRETNFHHAEDALILSTLTRGWQNRLHRMLRDNYGKSEAELKELWKKYMPHIEGLTLADYIDEAFRRFMSKGEESLFYRDMFDTIRSISYWVDKKPLSASSHKETVYSSRHEVPTLRKNILEAFDSLNVIKDRHKLTTEEFMKRYDKEIRQKLWLHRIGNTNDESYRAVEERATQIAQILTRYQLMDAQNDKEIDEKFQQALKELITSPIEVTGKLLRKMRFVYDKLNAMQIDRGLVETDKNMLGIHISKGPNEKLIFRRMDVNNAHELQKERSGILCYLNEMLFIFNKKGLIHYGCLRSYLEKGQGSKYIALFNPRFPANPKAQPSKFTSDSKIKQVGIGSATGIIKAHLDLDGHVRSYEVFGTLPEGSIEWFKEESGYGRVEDDPHH

SEQ ID NO: 196 - protein, 1327 aa, Solobacterium moorei
MEGQMKNNGNNLQQGNYYLGLDVGTSSVGWAVTDTDYNVLKFRGKSMWGARLFDEASTAEERRTHRGNRRRLARRKYRLLLLEQLFEKEIRKIDDNFFVRLHESNLWADDKSKPSKFLLFNDTNFTDKDYLKKYPTIYHLRSDLIHNSTEHDIRLVFLALHHLIKYRGHFIYDNSANGDVKTLDEAVSDFEEYLNENDIEFNIENKKEFINVLSDKHLTKKEKKISLKKLYGDITDSENINISVLIEMLSGSSISLSNLFKDIEFDGKQNLSLDSDIEETLNDVVDILGDNIDLLIHAKEVYDIAVLTSSLGKHKYLCDAKVELFEKNKKDLMILKKYIKKNHPEDYKKIFSSPTEKKNYAAYSQTNSKNVCSQEEFCLFIKPYIRDMVKSENEDEVRIAKEVEDKSFLTKLKGTNNSVVPYQIHERELNQILKNIVAYLPFMNDEQEDISVVDKIKLIFKFKIPYYVGPLNTKSTRSWVYRSDEKIYPWNFSNVIDLDKTAHEFMNRLIGRCTYTNDPVLPMDSLLYSKYNVLNEINPIKVNGKAIPVEVKQAIYTDLFENSKKKVTRKSIYIYLLKNGYIEKEDIVSGIDIEIKSKLKSHHDFTQIVQENKCTPEEIERIIKGILVYSDDKSMLRRWLKNNIKGLSENDVKYLAKLNYKEWGRLSKTLLTDIYTINPEDGEACSILDIMWNTNATLMEILSNEKYQFKQNIENYKAENYDEKQNLHEELDDMYISPAARRSIWQALRIVDEIVDIKKSAPKKIFIEMAREKKSAMKKKRTESRKDTLLELYKSCKSQADGFYDEELFEKLSNESNSRLRRDQLYLYYTQMGRSMYTGKRIDFDKLINDKNTYDIDHIYPRSKIKDDSITNRVLVEKDINGEKTDIYPISEDIRQKMQPFWKILKEKGLINEEKYKRLTRNYELTDEELSSFVARQLVETQQSTKALATLLKKEYPSAKIVYSKAGNVSEFRNRKDKELPKFREINDLHHAKDAYLNIVVGNVYDTKFTEKFFNNIRNENYSLKRVFDFSVPGAWDAKGSTFNTIKKYMAKNNPIIAFAPYEVKGELFDQQIVPKGKGQFPIKQGKDIEKYGGYNKLSSAFLFAVEYKGKKARERSLETVYIKDVELYLQDPIKYCESVLGLKEPQIIKPKILMGSLFSINNKKLVVTGRSGKQYVCHHIYQLSINDEDSQYLKNIAKYLQEEPDGNIERQNILNITSVNNIKLFDVLCTKFNSNTYEIILNSLKNDVNEGREKFSELDILEQCNILLQLLKAFKCNRESSNLEKLNNKKQAGVIVIPHLFTKCSVFKVIHQSITGLFEKEMDLLK

SEQ ID NO: 197 - protein, 738 aa, Treponema phagedenis
MLQELFAKEIAKIDEGFFRRLDESAFYLEDKSLKQKYSLFNDDNFTDKDYYKKFPTIHHLIKALINDETHVDIRLLYLACHTIIKNRGHFLFEGKEFNTESRFDDAINELFSYLRQDMEIDFAFEDKIADIKEILENKKIGMRDKQNALNKKLSIAPKDKQKKEIIKLIVGASFNLKTLFNDEKYSSEKESYSFAKSNYEEKEAVLESLLGDGFGLILRAKAVYDSSVLSEILGNETYLSFAKVKIYDKHKEDLAKLKKVIKTYHADEFKKVFAEANIQGNYCSYVGSCKKNGKKVPIEKRADKDAFYDFLKKILKDEKAKNSDADYAFILNEIELKTFLPKQVSKKNANIPYQLRRMELEKIVNNAEKYFSFLSEKDEYGTVKEKIIQLLTFKRPYYIGIIQDTHKEKFPDRCWVVKKENAKNEKITPWNFYDHIDEDKTAEAFITSRTNKCTYLIGEDVLPRNSLLYMEYTVLNELNNLKVSVDGVNIFDVKLKKKIYEQVFKQRKEVSKKTIADFLKKEGICKKENDVVITGIDEKCTTSLKLYIDIKKIIGKRIEEEPTKNALEDIILWASIYDEGEGRKILEAKIQSVYPDVFTQDELNKILKLKISGWGRFSRKFLESIVASFPGFTDTINIITAMRETNFNLMELLGDAYGFSKGIEKFNSKFNDDKKVFSYDKLVKDLYLSPSVKRMLWRALVIVKEVKSIMGKDPKKYLLKWQEEKKLKREGLPPAMQV

SEQ ID NO: 198 - protein, 1377 aa, Streptococcus equinus
MEKTYSIGLDIGTNSVGWAVITDDYKVPAKKMKVLGNTDKKYIKKNLLGALLFDSGETAEATRLKRAARRRYTRRKNRLRYLQEIFAKEMAKVDESFFQRLEESFLTDDDKTFDSHPIFGNKAEEDTYHQEFPTIYHLRKHLADSPEKVDLRLVYLALAHMIKFRGHFLIEGQLNAENTDVQKIFADFVGVYDRTFDDSHLSEITVDAASILTEKISKSRRLENLIKQYPTEKKNTLFGNLVALALGLQPNFKTNFKLSEDAKLQFSKDTYDEDLEELLGKIGDDYADLFTAAKNLYDAILLSGILTVDDNSTKAPLSASMIKRYEEHHEDLEKLKTFIKVNNFDKYHEIFKDKSKNGYAGYIENGVKQDIFYKHLKSIISEKNGGQYFLDKIEREDFLRKQRTFDNGSIPYQIHLQEMRTILRRQGEYYPFLKENQAKIEKILTFRIPYYVGPLARKNSRFAWAKYHSDEPITPWNFDEVVDKEKSAEKFITRMTLNDLYLPEEKVLPKHSYVYETFAVYNELTKIKYVNEQGKSFFFDANMKQEIFDHVFKENRKVTKAKLLSYLNNEFEEFRINDLIGLDKDSKSFNASLGTYHDLKKILDKSFLDDKTNEQIIEDIVLTLTLFEDRDMIHERLQKYSDIFTSQQLKKLERRHYTGWGRLSYKLINGIRNKENNKTILDFLIDDGDANRNFMQLINDDSLSFKTTIQEAQVVGDVDDIEAVVHDLPGSPAIKKGILQSVKIVDELVKVMGHNPQNIVIEMARENQITGYGRNRSNQRLKRLQDSLKEFGSDILSKKKPSYVDSKVENSHLQNDRLFLYYIQNGKDMYTGEELDIDHLSDYDIDHIIPQAFIKDNSIDNRVLTSSAKNRGKSDDVPSIEIVRNRKSYWYKLYKSGLISKRKFDNLTKAERGGLTETDKAGFIKRQLVETRQITKHVAQILDARFNTKCDENDKVIRDVKVITLKSSLVSQFRKEFKFYKVREINDYHHAHDAYLNAVVGTALLKKYPKLAPEFVYGEYKKYDVRKLVAKSSDNHSELGKATAKYFFYSNLMNFFKTEVKYADGRVFERPDIETNADGEVVWNKQRDFNIVRKVLSYPQVNIVKKVEVQTGGFSKESILPKGDSDKLIPRKTKKLQWETQKYGGFDSPTVAYSVLVVADVEKGKTRKLKTVKELVGISIMERSSFEENPVSFLEKKGYHNVQEDKLIKLPKYSLFEFEGGRRRLLASATELQKGNEVVLPQYMVNLLYHSQHVNNSHKPEHLNYVKQHKDEFKDIFNLIISIARINILKPKVVDNLINEFTEYGQEDISSLSESFINLLKFISFGAPGAFKFLKLDVKQSNLRYKSTTEALSATLIHQSVTGLYETRIDLSKLGEE

SEQ ID NO: 199 - protein, 1128 aa, Streptococcus vestibularis
MSDLVLGLDIGIGSVGVGILNKVTGEIIHKNSRIFPAAQAENNVERRTNRQGRRLTRRKKHRRVRLNHLFEESGLITDFTKVSINLNPYQLRVKGLIDELSNEELFIALKNMVKHRGISYLDDASDDGNSSVGDYAQIVKENSKQLETKTPGQIQLERYQKYGQLRGDFTVEEDGKKHRLINVFPTSAYRSEALRILQTQKEFNPQITDEFINRYLEILTGKRKYYHGPGNEKSRTDYGRYTTKKDSENEYITLDNIFGILIGKCTFYPEEYRAAKASYTAQEFNLLNDLNNLTVPTETKKLSEEQKNQIINYVKNEKAMGPAKLFKYIAKLLSCDVADIKGYRIDKSDKAEIHTFEAYRKMKTLETIDFEKMSRDQLDKLAYVLTLNTEREGIQEALDHEFADGNFSQEQIDELVQFRKANSSIFGKGWHNFSVKLMMELIPELYATSEEQMTILTRLGKQKTTSSSNKTKYIDEKLLTEEIYNPVVAKSVRQAIKIVNAAIKEYGDFDNIVIEMARETNEDDEKKAIQKIQKANKDEKDAAMLKAANQYNGRAELPHSVFHGHKQLATKIRLWHQQGERCLYTGKTISIHDLINNPNQFEIDHILPLSITFDDSLANKVLVYATANQEKGQRTPYQALDSMDDAWSFRELKAFVRESKSLSNKKKEYLLTEEDISRFDVRKKFIERNLVDTRYASRVVLNALQEHFRAHKTDTKVSVVRGQFTSQLRRHWGIEKTRDTYHHHAVDALIIAASSQLNLWKKQKNTLVNYSENQLLDIETGELISDDEYKESVFKAPYQHFVDTLKSKEFEDSILFSYQVDSKFNRKISDATIYATRQAKVGKDKKDETYVLGKIKDIYSQTGYDAFIKIYQKDKSKFLMYRHDPQTFEKVIEPILENYPNKEMNEKGKEVPCNPFLKYKEEHGDYIRKYSKKGNGPEIKSLKYYDSKLGNHIDITPKDSNNKVVLQSVSPWRADVYFNKTTGKYEILGLKYADLQFEKGTGTYKISQEKYNVIKKKEGVDSDSEFKFTLYKNDLLLIKDTETKEQQLFRFLSRTKPNVKHYVELKPYDKQKFEGNESLINVLGAVAKGGQCQKGINKPNISIYKVRTDVLGNQHIIKNEGDKPKLDF

SEQ ID NO: 200 - protein, 1080 aa, Methylocystis sp.
MRVLGLDGGIASIGWALIEIFEDHEPSDGRIIDTGAWMFDAPEEKSQTGTKLKSELRRIFRGQRRVIRRRRQRMNEVRRILHRHGLLSSDNRDALKQPGLDPWKIRAEGIDRLLSPIEFAVALGHIARHRGFKSNSKGAKTSDLDAESSRMKKAVGETREKLARFGSPAKLLVEDEGFVLRQTKLKSGALETVRRFRNRDGDYSRSLLRDDLAAEVRALFRAQARLQSTFAKVELEAEFTQAAFFQRPLQDSERLVGPCPFEPAEKRSPKRGYSFELFRFLSRLNHLTLREGSEERTLTVEELRTAAADFGGVAKFTFSTLRKRLALPDIAIFVGIKADDEKKLDVVARSGEAATGTARLRRVVIDALGELAWGALISAPERLDKITEIITFRSDLDRIRAGLIEAGFDTPLIEAIVRAAADGKLDAFTGVGHISAKAARNIIPGLMRGMTYDKACAAAGYDHTASRERDAFDVGMHGKEALKKILQEERISRELVGSPSARKALIEAVKQVKAIIEKYGVPDRIHVELARDVGKSIEERRDIHFGIEKRSRQKDKLRELFGKEVGHLPQDGERGKEELLRFELWNEQMGRCLYTDEYINPKQLVASDNSVQVDHILPWSRFGDDSYLNKTLCTAKANQDKKGRTPYEWFRADKPEAEWDAFVARVESIQFMKGLKKRNYKLKNAEEAAEKFRSRNLNDTRWTCRLLAEALKQLYPKGEKDKDGKERRRVFTRPGALTNRLRRAWSLQRRKKSEKGERIADDRHHALDAIIVAATTESLLIRATREVQDIERKGLHYDLTKNITQPWPGFADEALDAVEKVFVARAERRRARGKAHDATIRHIAVRDDEAKVYERKKVGDIKLGDLIRVKDAERNAPLIENLRKWIEAGSPRDNPPLSPKGDPVSKVRLVTKNKVNITLDTGNPERLATVDRGEMARVDVFRKANRKGKYEYYLVPIYPHEIATMETPPMRAVQGGGDDDKWPEIDSTFEFLWSINQLSLLELTKPDGEVIRSYFRSLDRNTGALTVSGIANSTATRKGIGTRTLIDFKKLHVDRLGQIFEVERELRTWRGETWRGKDCI

SEQ ID NO: 201 - protein, 1087 aa, Phascolarctobacterium succinatutens
MLRMKYAIGLDIGIASVGYAVLALDHEENPWGIIRLGSRIFDVAENPKDGASLALPRREARSVRRRLRRHHHRLERIKNLLINTEFITKDELLHLYDGNLSDVYELRVKALDYSVTNAELTRILLHLAQRRGFKSNRKSDANDKEAGQLLEAVSANAKRMQENHYRTVGEMFYKDDLFSKYKRNKGGTYLTTVHRDMIAAEARTILEKQFALGNNICTQDFIDKYLSILLSQRQFDEGPGEPSPYAGNQIANMIGKCTFEPNEYRAAKASYSFERFNLLQKVNHLRLLLEGKSIALDNEQRKKIIALAHDKADLRYSHIRKALGLDEKVLFNTITYNDDVSVIEKKTKFNFLQAYHQIKKVLAEDMQKLTTEQLDNIGQILSTYKSDNKRTEELSALGLEKKIIDALLGINGLSKFAHLSLKALRKINPYLEEGKIYNEACTAAGYDFKAHANTQKTELLPAYKEEMDDITSPVARRAIAQSIKVINAIIREQKGSPLYINIELAREMAKGFDERTQIDKANKENQAKNERIMERIRTEFHKANPTGMDLIKLKLWEEQDGRSPYSQKAISINRLFEPGYVDIDHIVPYSISFDDSFKNKVLVFSDENRDKGNRLPIAYLQSKFGAKAAENFMIWVQSNIKDYKKRQKLLKREITEEDINKFKERNLQDTKTISRFLYNYINDYLLFAPSDTGKKKRVTAVNGTITAYLRKRWGINKIRANGDKHHAVDAVVIACTTDKMIKDLSSFSRYHELEYTHTDTESFLVNSLTGEILKRFPYPWEDFRPELMARLSDNPADALRKLNLIFYHGIDLSTIKPIFVSRMPRHKVTGAAHKATIKSARCLDNGIVICKTSLQNLKLDKEGEIANYYAPESDTILYNALKERLRSYDNKPAKAFAEPFYKPKADGTPGPLVKKVKVYEKSTLNVAVQQNTAVADNDSMVRVDVFHVKGNGYYLVPIYIADTLKKELPNKAIVAYKPYADWPVMDDSNFIFSLYPNDLIKFEHKNSVKFAKVNKESTLNDFYSTKSEIVYFKGCNINTGAITIINHENTYVVSSLGVKTLPSLEKYQADVLGNYTKVKKEVRKPFR

SEQ ID NO: 202 - protein, 1375 aa, Lactobacillus ruminis
MRKNQEPYNIGLDIGTSSIGWSIMNDNFDLMRVKGKKGIGVRLYNEGQSAAERRMHRTARRRYGRRKWRLRLLEDFFDEHMAEVDDTFFARLKDSNISPKDDKKYRKSLLFPKSKGVTYQDDGEFYKKYPTMYHLRYALMTEHRKFDLREIYLAFHHMVKYRGNFLYDTSVDSFEAKNLDIKGKFDEINDLLSSYTDFYVDNSNAALVESILLEKNTTRKDKSKKIAKLLHVEDKEKGKNKKAKDLATQISNAVLGLKCNFHLIFELQQKYSFDLCSEKTEENIAKLSEVLDENQKMLLMILKEVQDQVMLNAFVPSGMSLSEAMMQKYDDYGEQLKIYHELEHSVSDDSAAKLRGAYRDYNDNIIKRIDGDNKKDTFYKRVKNILTKISKEYVDQDVLESCGKLKKLIDENKLFIRQRTAANGVLPHQLHQIEMRKIIDNQKEYYPWLAEPNPNEKRRVYSKYKVEELIAFRIPYYVGPLVDPNNADKNKEARFSWMVRKKDGEITPWNFYDKVDWAESANNFIERMKSKDTYLLGEDVVPKESMLYQKYEVLNELNNLRINDSGLSDSFEDVKLKQAIYNDLFKKQKIVKITDLQNYLVQNHKYLVKPKISGLADENRFLSSLSTYSDLKTIFGDKVDDRTYFNDFEKMVEYSTVFEDGHDYNQKLDEYTWLTKEEKYKIGKKRYRGWGKLSKKLLTGLRDKNNHTIMDNLWETNRNFMQIQTADEFSKQIAEENERHLKGSVSDAINDMYTSPANKKAIRQVLRVVDDIQKAMGYAPSSISLEFAREDGPSVRTVSRANRMKSIYEKYASEVSEEVMKDLDGVIKDKKGLNDRLYLYFEQQGKDMYSGHPLDFDKVISGQEYDIDHILPQAVIKDDSLDNRVLTTKALNNDVKSKGVPCRMFNGMHSFWKNLYDKGFISRRKFNNLTTNPENIDKYKMKGFVNRQLVETRQIIKLVANVLNDKYQNDDVDIIEVRAELTHDVRKHFKFYKNRNVNDYHHAFDAYLTSFIGHYLFKKYPNLRPLFDYNDFMKVSDNVFKQLRGNNFLGEFLNKTGDIISTDGNFVLNKEEMINKLNKAYAFKKILVTKEVGQRTGAMFNETRYPAPNSRKAALKYRRMPKPDSLISVKDYKNTDIYGGYSGKNDAYMVIVDMGKQYMVVGVPVRYTEKLDKLRIKHSELYRDELRKVLSRDKTLLDSKGNVKRFDIVLDRVLYGQLIEDGNELFTLGSSKYKRNFRQLFLDKQCIEILDSSATPQPTDEELIWVYDQILDKVDKYFELYDINRQRETLRKGRAAFCSLPNISMKKDDVTKKKILNEILVALHANESESNCEKIGKKVFGRLQVPGGIKLSKEAKLIYQSPTGLFERVVYLKDL

SEQ ID NO: 203 - protein, 1391 aa, Prevotella oralis
MKKILGLDLGTTSIGWALVNEKENNEELSSIIRLGVRVNPLTVDEKSNFEKGKDITTNADRTKCRSARRNLQRFKLRREALADCLKRHGLMTDETPLCETNNSIIFKTYSNRAKAVCEKIALDDFVRVLFMINKKRGYKSSRKLNTDDEGTLVDGMDVAKLLYNEQITPGEYLLRLFKKGKKTRPDFYLSDLKAELERIWDFQRTFYPEILCNALKEDLKGKSRTQSSAIFYAKYKVSTAKIAGKDKRLQELTWRTDALRKQLTIDEVAYVICSINGEVNGSSQRLSMISDRSKLLYFNHQTIGQYLMQRLEENPNAGLKNIIFYRQDYEDEFNDIWNSQATYHKELTPELKKEVKDIIFYQRGLKSCKWLINYCELEHEEIEVKTPEGKLRKITIGSKTCPKSSPLFQEFKIWQVLNNLQVSPLNSRRKAKRKKDEEPSLFSDEDMNTACRYLNEEEKLTLFKELSIKKELKKKDALKLLFENYKELDLNYKVISGNVTMANLYRAFQDIISLTGNGEFDFQAMPAEEAEKTVEEIFGGLGYKTAFLHFDASLHDKEFERQPAYRLWHLLYSYAGDQSKTGIEALVKRIQELCGFEPEYARILANISFIPDYGNLSSKAMRKILPYMQDGYEYSEACSKAGYRHSASSLTKEEINKKNYKTHLDEIKRNSLRNPIVEKILNQMVNVVNSVIDTYSNIDEIRIEMARELKKSKPEREDMSFAISKATKETERIKGILEQEFKIQHVTRNDIIRYRLYEELKPNGYKTLYSNTYIPREDLFSKKFDIEHIIPKARLFDDSYSNKTLELRDINIEKGNQTAYDFVLSKYGEEGLYKYEQRVEEFKKNNEQAGTKCRKLLMREADIPSDFLNRDLNDSQYIAKKAHELLREIVPTVTATTGSITNRLREDWKLVNVMKELNWEKYDKLGLTEEYKDKDGNTVRHIKDWTKRNDHRHHAMDALTIAFTKPSFIQYLNNLNARSNRGGSIYGIEQKELERENNKLVFIPPIDPKIFRKQAKEHLSNILISIKAKNKVVTKNVNKTKSKSGTNRKVQLTPRGQLHLETVYGKIRTYKTEEIKVGTKLTEELIAKVADKKIREALMQRLSEYGGNIKKAFQNISKHPIWLNGSHTKHVPEKVKIVFFEDVFTIRKAITPDIKIDKVIDSKIRRILQERLNEFGGEASKAFSNLDENPIWFNRDKGIAIKSVKIRGIAKGTAIRVKKDIHGKTIIGNNGYPVANDYVNTGNNHHVAIFRDKDGNLQEHIVSFYEATARAIQNLPIVDRNYNSEKDWKFLFSMKQNEYFVFPNPNTGFNPSEISLKDEKNYALISPNLFRVQKLSHYYYVFRHHLETNVDTNLQLKDITWKRITAVNNLTGAVKVRIDHLGRIVDVGEYK

SEQ ID NO: 204 - protein, 1167 aa, Streptococcus sanguinis
MLFGLKTKFKDCFELEEEPDLNFSKENYDDNLEKLLGELGEDFSDVFDKLKILRDTILLSGMLTYTGATHARFSATMVERYEEHRKDLQRFKSFIKQNLSEQDYLDIFGRKTQNGFDVDKETKGYVGYITNKMVLTNPQKQKTIQQNFYDYISGKITGIEGSEYFLNKISDRTFLRKLRTSDNGAIPNQIHAYELEKIIERQGKDYPFLLENKDKLLSILTFKIPYYVGPLAKGNNSRFAWIKRANSSDILDDNDEDTRNGKIRPWNYHKLINMDETRDAFITNLIGNDTILLNEKVLPKRSLIYEEVMLQNELTRVKYKDKYGKAHFFDSEHRQNIINGLFKINSKRVNAERLIKYLSDNHKDLNAIEIVSGVEKGKSFNSTLKTYNDFKTIFSEEFLDSEIYQKELEEIIKVITVFDDKKSIKNYLTKYFGHLEFLDEEKINQLSKLRYTGWGRYSAKLLLDIRDEDTGFNLLQFLRNDEENRNLTNLISDNTLSFDPKIKAIQSKSTVEDDVFDEIKKLAGSPAIKRGILNSIKIVDELVQIIGYPPQNIVIEMARENMTTEEGQKKTKTRKSKLESALKNIENSVLENGKVLHSDEQLQSEKLYLYYLQNGKDIYSLDETGSPAPIYLDQLDQYEVDHIIPYSFLPIDSIDNKVLTHRKNNQRKLDNIPDKETVAHMKPFWEALYNAKLISQTKYQRLTTSERTPDGVLTESMKAGFIERQLVETRQIIKHVARILDNRFSDTKIITLKSQLVTNFRNTFHIAKIRELNDYHHAHDAYLAVVVGQTLLKAYPKLAPELIYGHHVHFNRHEENKATLRKHLYSNIMRFFNNPDSKVSKDIWDCNRDLPIIKHVIYNSQINFVKRTMIKKGAFYNQNPVGKFNKQLAANNRYPLKTKALCLDTSIYGGYGPMNSTLSIIIIAERFNEKKGKIETVKEFHDIFIIDYEKFNNNPFQFLNDTSENGFLKKNNINRVLGFYRIPKYSLMQKIDGTRMLFESKLNLHKATQFKLTKTQNELFFHMKRLLTNSNLMDLKSESAIKESQNFILKHKEEFDNISNQLSAFSQKMLGNTTSLKNLIKGYNERKIKEIDIREETIKYFYDNFIKMFSFVKSGAPKDINDFFDNKYTVARMRPKPDKRLLNATLIHQSITGLYETRIDLSKLGED

SEQ ID NO: 205 - protein, 1334 aa, Staphylococcus pseudintermedius
MGRKPYILSLDIGTGSVGYACMDKGFNVLKYHDKDALGVYLFDGALTAQERRQFRTSRRRKNRRIKRLGLLQELLAPLVQNPNFYQFQRQFAWKNDNMDFKNKSLSEVLSFLGYESKKYPTIYHLQEALLLKDEKFDPELIYMALYHLVKYRGHFLFDHLKIENLTNNDNMHDFVELIETYENLNNIKLNLDYEKTKVIYEILKDNEMTKNDRAKRVKNMEKKLEQFSIMLLGLKFNEGKLFNHADNAEELKGANQSHTFADNYEENLTPFLTVEQSEFIERANKIYLSLTLQDILKGKKSMAMSKVAAYDKFRNELKQVKDIVYKADSTRTQFKKIFVSSKKSLKQYDATPNDQTFSSLCLFDQYLIRPKKQYSLLIKELKKIIPQDSELYFEAENDTLLKVLNTTDNASIPMQINLYEAETILRNQQKYHAEITDEMIEKVLSLIQFRIPYYVGPLVNDHTASKFGWMERKSNESIKPWNFDEVVDRSKSATQFIRRMTNKCSYLINEDVLPKNSLLYQEMEVLNELNATQIRLQTDPKNRKYRMMPQIKLFAVEHIFKKYKTVSHSKFLEIMLNSNHRENFMNHGEKLSIFGTQDDKKFASKLSSYQDMTKIFGDIEGKRAQIEEIIQWITIFEDKKILVQKLKECYPELTSKQINQLKKLNYSGWGRLSEKLLTHAYQGHSIIELLRHSDENFMEILTNDVYGFQNFIKEENQVQSNKIQHQDIANLTTSPALKKGIWSTIKLVRELTSIFGEPEKIIMEFATEDQQKGKKQKSRKQLWDDNIKKNKLKSVDEYKYIIDVANKLNNEQLQQEKLWLYLSQNGKCMYSGQSIDLDALLSPNATKHYEVDHIFPRSFIKDDSIDNKVLVIKKMNQTKGDQVPLQFIQQPYERIAYWKSLNKAGLISDSKLHKLMKPEFTAMDKEGFIQRQLVETRQISVHVRDFLKEEYPNTKVIPMKAKMVSEFRKKFDIPKIRQMNDAHHAIDAYLNGVVYHGAQLAYPNVDLFDFNFKWEKVREKWKALGEFNTKQKSRELFFFKKLEKMEVSQGERLISKIKLDMNHFKINYSRKLANIPQQFYNQTAVSPKTAELKYESNKSNEVVYKGLTPYQTYVVAIKSVNKKGKEKMEYQMIDHYVFDFYKFQNGNEKELALYLAQRENKDEVLDAQIVYSLNKGDLLYINNHPCYFVSRKEVINAKQFELTVEQQLSLYNVMNNKETNVEKLLIEYDFIAEKVINEYHHYLNSKLKEKRVRTFFSESNQTHEDFIKALDELFKVVTASATRSDKIGSRKNSMTHRAFLGKGKDVKIAYTSISGLKTTKPKSLFKLAESRNEL

SEQ ID NO: 206 - protein, 1156 aa, Ruminococcus albus
MGNYYLGLDVGIGSIGWAVINIEKKRIEDFNVRIFKSGEIQEKNRNSRASQQCRRSRGLRRLYRRKSHRKLRLKNYLSIIGLTTSEKIDYYYETADNNVIQLRNKGLSEKLTPEEIAACLIHICNNRGYKDFYEVNVEDIEDPDERNEYKEEHDSIVLISNLMNEGGYCTPAEMICNCREFDEPNSVYRKFHNSAASKNHYLITRHMLVKEVDLILENQSKYYGILDDKTIAKIKDIIFAQRDFEIGPGKNERFRRFTGYLDSIGKCQFFKDQERGSRFTVIADIYAFVNVLSQYTYTNNRGESVFDTSFANDLINSALKNGSMDKRELKAIAKSYHIDISDKNSDTSLTKCFKYIKVVKPLFEKYGYDWDKLIENYTDTDNNVLNRIGIVLSQAQTPKRRREKLKALNIGLDDGLINELTKLKLSGTANVSYKYMQGSIEAFCEGDLYGKYQAKFNKEIPDIDENAKPQKLPPFKNEDDCEFFKNPVVFRSINETRKLINAIIDKYGYPAAVNIETADELNKTFEDRAIDTKRNNDNQKENDRIVKEIIECIKCDEVHARHLIEKYKLWEAQEGKCLYSGETITKEDMLRDKDKLFEVDHIVPYSLILDNTINNKALVYAEENQKKGQRTPLMYMNEAQAADYRVRVNTMFKSKKCSKKKYQYLMLPDLNDQELLGGWRSRNLNDTRYICKYLVNYLRKNLRFDRSYESSDEDDLKIRDHYRVFPVKSRFTSMFRRWWLNEKTWGRYDKAELKKLTYLDHAADAIIIANCRPEYVVLAGEKLKLNKMYHQAGKRITPEYEQSKKACIDNLYKLFRMDRRTAEKLLSGHGRLTPIIPNLSEEVDKRLWDKNIYEQFWKDDKDKKSCEELYRENVASLYKGDPKFASSLSMPVISLKPDHKYRGTITGEEAIRVKEIDGKLIKLKRKSISEITAESINSIYTDDKILIDSLKTIFEQADYKDVGDYLKKTNQHFFTTSSGKRVNKVTVIEKVPSRWLRKEIDDNNFSLLNDSSYYCIELYKDSKGDNNLQGIAMSDIVHDRKTKKLYLKPDFNYPDDYYTHVMYIFPGDYLRIKSTSKKSGEQLKFEGYFISVKNVNENSFRFISDNKPCAKDKRVSITKKDIVIKLAVDLMGKVQGENNGKGISCGEPLSLLKEKN

SEQ ID NO: 207 - protein, 1440 aa, Weeksella virosa
MKTILGLDLGTNSIGWALVEQDFENKQGLILGMGSRIIPMDAGIIGKFAEGSSISQTAERTGYRSIRRLRERHLLRRERLHRVLNILKFLPEHYAAEIDFEKRFGQFLAETEPKLAWKKNAEGKFEFLFQRSFDEMVADFKANGQDIKIPYDWTIYYLRKKALTQKISPQELAWIILNFNQKRGYYQLRGEEEEENPNKKVEFYSLKIVDVVADEQPNKKGDTWYSLHLENGWVYRRSSKIPLYDWKDKVRDFIVTTDINEDGSEKLDKDGEVKRSFRAPKEDDWTLIKKKTEQEIEQFNQTVGSYIYEALLDNPTQKIRGKLVRTIERKFYKSELKKILEKQIELQPELFTEDLYNACARELYRRNVAHQQQLSSRDFVYLFLNDIIFYQRPLRSQKSLISNCSLEFRTIKDKDGNGQIIYLKAIPKSNPYYQEFRVWQWLYNLKIFTKEDDKDVTNQFINKVEDLEALFEFLMNQKEVNHTDILTYLIEPIVKSKYPNAKGKAFKDELKKELKKYRWNYVYDADKDESKSYPMNETRYELRKRLDKVENVPADFMTRKIEQHLWHIIYSVTDKIEFEKALKSFANKYDLHQESFVENFKRFKPFDSDYGTYSEKAIKKLLPLMRVGKYWSWDIIDDKTKTRIGKIITGEYDETIKNRVREKAIDLTEENHFQGLQLWLAQYIVYDRHSEADIAGKWNSVADLEQYLSEFKQHSLRNPIVEQVITETLRVVRDIWKQYGKGAKDYFDEIHIELGREMKNTAEERKRLSSIISENETTNLRIRAILEELMYDENMENVRPYSPMQQEALKIYEDGVLSSSVEIPEDIEKISKKSEPTKSEIQRYKLWLEQKYRSPYTGRPIPLSKLFTPAYQIEHIIPQARFFDDGFSNKVICESEVNALKDKMLGLEFIQNYYGQKVTTSFGEVTILTEDAYKAFVKEHYDKNRSKRNKLLLEEIPEKMIDRQMNDTRYISKYISKVLSNLVRGEKDDEGVNSKNIIPGNGKITGILKQDWGLNDVWNDLILPRFERMNQLTNSTDFTAWNEKHQKFLPSVPLELSKGFQKKRIDHRHHALDALIIACATRDHVNLLNNKHAKSRNERYDLQHKLRHTTPWQDKEGKVRTKFTEFKKPWETFTQDTKKELEKIVVNFKQNLRVINKATNYYEKIVDGKKVMFKQEGVNWAIRKPMHKETVSGKIDLPRVKVSKGKILTATRKSLDTSFNAKTILSITDTGIQKILLNYLKAKGNPELAFSPEGIEEMNQNISLYNDGKPHQPILKVRVFEQGSKFPLGETGNKTTKYVEAAKGTNLFFGVYEDNQGKRSYDTIPLNIVIERQKQGLNSVPETNEKGHRLLFSLSPNDLVYVPIEGEVFDETNPDVNRIYKVVSFSGSQMFCVRQDVATSIVYKLEFSSLNKMERTIDGIMIKEICIKLKVDRLGNISKA

SEQ ID NO: 208 - protein, 1179 aa, Sphaerochaeta globus
MSKKVSRRYEEQAQEICQRLGSRPYSIGLDLGVGSIGVAVAAYDPIKKQPSDLVFVSSRIFIPSTGAAERRQKRGQRNSLRHRANRLKFLWKLLAERNLMLSYSEQDVPDPARLRFEDAVVRANPYELRLKGLNEQLTLSELGYALYHIANHRGSSSVRTFLDEEKSSDDKKLEEQQAMTEQLAKEKGISTFIEVLTAFNTNGLIGYRNSESVKSKGVPVPTRDIISNEIDVLLQTQKQFYQEILSDEYCDRIVSAILFENEKIVPEAGCCPYFPDEKKLPRCHFLNEERRLWEAINNARIKMPMQEGAAKRYQSASFSDEQRHILFHIARSGTDITPKLVQKEFPALKTSIIVLQGKEKAIQKIAGFRFRRLEEKSFWKRLSEEQKDDFFSAWTNTPDDKRLSKYLMKHLLLTENEVVDALKTVSLIGDYGPIGKTATQLLMKHLEDGLTYTEALERGMETGEFQELSVWEQQSLLPYYGQILTGSTQALMGKYWHSAFKEKRDSEGFFKPNTNSDEEKYGRIANPVVHQTLNELRKLMNELITILGAKPQEITVELARELKVGAEKREDIIKQQTKQEKEAVLAYSKYCEPNNLDKRYIERFRLLEDQAFVCPYCLEHISVADIAAGRADVDHIFPRDDTADNSYGNKVVAHRQCNDIKGKRTPYAAFSNTSAWGPIMHYLDETPGMWRKRRKFETNEEEYAKYLQSKGFVSRFESDNSYIAKAAKEYLRCLFNPNNVTAVGSLKGMETSILRKAWNLQGIDDLLGSRHWSKDADTSPTMRKNRDDNRHHGLDAIVALYCSRSLVQMINTMSEQGKRAVEIEAMIPIPGYASEPNLSFEAQRELFRKKILEFMDLHAFVSMKTDNDANGALLKDTVYSILGADTQGEDLVFVVKKKIKDIGVKIGDYEEVASAIRGRITDKQPKWYPMEMKDKIEQLQSKNEAALQKYKESLVQAAAVLEESNRKLIESGKKPIQLSEKTISKKALELVGGYYYLISNNKRTKTFVVKEPSNEVKGFAFDTGSNLCLDFYHDAQGKLCGEIIRKIQAMNPSYKPAYMKQGYSLYVRLYQGDVCELRASDLTEAESNLAKTTHVRLPNAKPGRTFVIIITFTEMGSGYQIYFSNLAKSKKGQDTSFTLTTIKNYDVRKVQLSSAGLVRYVSPLLVDKIEKDEVALCGE

SEQ ID NO: 209 - protein, 1370 aa, Streptococcus gallolyticus
MTKKNYSIGLDIGTNSVGWAVITDDYKVPAKKMKVLGNTDKKYIKKNLLGALLFDSGETAEATRLKRTARRRYTRRKNRLRYLQEIFAEEMTKVDESFFYRLDESFLTTDEKDFERHPIFGNKAEEDAYHQKFPTIYHLRNYLADSSEKADLRLVYLALAHMIKYRGHFLIEGKLNAENTDVQKLFTDFVGVYDRTFDDSHLSEITVDVASTLTEKISKSRRLENLIKYYPTEKKNTLFGNLIALALGLQPNFKMNFKLSEDAKLQFSKDTYEEDLEELLGKIGDDYADLFTSAKNLYDAILLSGILTVDDNSTKAPLSASMIKRYVEHHEDLEKLKEFIKANKSELYHDIFKDKNKNGYAGYIENGVKQDEFYKYLKNTLSKIDGSDYFLDKIEREDFLRKQRTFDNGSIPHQIHLQEMHAILRRQGDYYPFLKEKQDRIEKILTFRIPYYVGPLVRKDSRFAWAEYRSDEKITPWNFDKVIDKEKSAEKFITRMTLNDLYLPEEKVLPKHSHVYETYAVYNELTKIKYVNEQGKESFFDSNMKQEIFDHVFKENRKVTKEKLLNYLNKEFPEYRIKDLIGLDKENKSFNASLGTYHDLKKILDKAFLDDKVNEEVIEDIIKTLTLFEDKDMIHERLQKYSDIFTANQLKKLERRHYTGWGRLSYKLINGIRNKENNKTILDYLIDDGSANRNFMQLINDDTLPFKQIIQKSQVVGDVDDIEAVVHDLPGSPAIKKGILQSVKIVDELVKVMGDNPDNIVIEMARENQTTNRGRSQSQQRLKKLQSSLKELGSNILNEEKPSYIEDKVENSHLQNDQLFLYYIQNGKDMYTGDELDIDHLSDYDIDHIIPQAFIKDDSIDNRVLTSSAKNRGKSDDVPSLDIVRARKAEWVRLYKSGLISKRKFDNLTKAERGGLTEADKAGFIKRQLVETRQITKHVAQILDARFNTEHDENDKVIRDVKVITLKSNLVSQFRKDFEFYKVREINDYHHAHDAYLNAVVGTALLKKYPKLASEFVYGEYKKYDIRKFITNSSDKATAKYFFYSNLMNFFKTKVKYADGTVFERPIIETNADGEIAWNKQIDFEKVRKVLSYPQVNIVKKVETQTGGFSKESILPKGDSDKLIPRKTKKVYWDTKKYGGFDSPTVAYSVFVVADVEKGKAKKLKTVKELVGISIMERSFFEENPVEFLENKGYHNIREDKLIKLPKYSLFEFEGGRRRLLASASELQKGNEMVLPGYLVELLYHAHRADNFNSTEYLNYVSEHKKEFEKVLSCVEDFANLYVDVEKNLSKIRAVADSMDNFSIEEISNSFINLLTLTALGAPADFNFLGEKIPRKRYTSTKECLTATLIHQSITGLYETRIDLSKLGEE

SEQ ID NO: 210 - protein, 1044 aa, Nitrosomonas sp.
MLHKMRYRLALDLGSTSLGWAMVRLNANQQPCAVIKAGVRIFSNGRNPKDGSSLAVTRREARSMRRRRDRLLKRKARMMRTLIEYGFFPANETQRKALENLNPYALRAKGLDEALTPSEFARALFHINQRRGFKSNRKTDKKDSDSGALKTAIKQLHSVLDPQGNDGKPRTVGELLYKRFTDLSKLPKDRTVRARYRQDKIVKDDGKTKIDKYYDLYIDRAMIEQEFDALWKKQSELNPILFTENARADLKDVLLYQRSLKPVKPGRCTFMSEEERAPLALPSTQRFRMYQEVNNLRILREGLKEESLTLQQRDDLINALEKNNRRTFTQIKKLLGVGGSVQFNFEDPKREELKGNTTSAILGKSEHFGEAWFAFNEAKQDAIVLQLIKEENEAKLVRWLQDETGIDEKRAEVIANAGLPEGYGSLCIEALARILPELRRDVVTYDKAVQAAGFEHHSKLNRNEEIPDITFKIESIDRNSGEIKQFHLHKELPYYGEYLQRHVGFGSGKPEDSIEKRYGKIANPTVHIGLNQVRVVVNALIKRYGHPSEIIVEVARDLKQSKDRRDEENKRQAENQKRNERLRKDIADILGISEERVRRDDIEKMILWEELSFDPADRRCPYSGVQVSTVMLLSDEVEVEHILPFSQTLDDSLNNKTVALRQANRIKGNRTPWEAFGTSNISGFDYSGILTRAELMPKAKRYRFAEDGYQRWLKDDAGFLARALNDTRHLSKIAREYMSLICPNTRVIPGQMTAMLRRNFGLNDVLGLNGEKNRNDHRHHAVDACVIAVTDQGLLQRFAAASASARERQLNRLVENMPLPWESYREHVRRAIDGIWVSHRPDHSHEGAMHNDTAYGLRGNGRVSFHKMVEGKREYIEDNLKVIEITDTKAIDRHGLLPTGKPRPYKGYKGDSNYCIEIVRNEKGRWEGEIISTFDAYQLVRKYGIVQLRYPVLSVSGKPLVMRLIRNDFVRLEHEGITRTLRVCKMREDGQVALADVTEANVDARTRTKEICYVFKTGGSLQKAKARRITISPIGELRDPGFKE

SEQ ID NO: 211 - protein, 1045 aa, Acidovorax avenae
MQKEKPLAYRLALDLGSTSLGWAVLRLSAPGEPSAVIRAGSRIFSDGRNPKDGSSLAVTRRAARAMRRRRDRLLKRKARMLAALERHGFFPQDEAARKALEKLNPYGLRARGLESALKPEEFGRALFHLNQRRGFQSNRKTDRKDSDSGALKQAIGTLRAQMHESGCRTVGEWFWKVRMERKPEGVKGQGVRARYRETPFTTDEGKKRIDKRYDLYVDRAMVAQEFDALWAAQATFAPALFNEAARAELRDILLHQRKLRPVQPGRCTLVPEEPRALLALPSTQRFRIYQEVNHLRVLHDELREEALTLAQRDQIVALLERQAKVTFTAMRKALGFSALFNLEDAKRDGLKGNATTAALGKKDLFGPLWAGFDTALQDEIVTQLMTEESEPRLIAWLQEHTGVDEARAQAIANAGLPEGYGSLGRTALARIVPELQRDVITYDKAVQAAGFAHHSDLGFSFEHDADEVERIGERTIASTGEIKPVFAFKQLPYYGRALQRHVAFAKENPRNDEERYGKIANPTVHIGLNQVRVVVNALMCRYGRPTEVVIELARDLKQSREQKLEAQQRQADNQKRNARIRRSIAEVLGISEERVRTLDIQKWILWEELSHDAADRRCPYSGVQISASMLLGERVEIEHILPFSMTLDDSLNNRTVALREANRIKRNRTPWDARTDFEAHGWSYDGILQRAERMPQRKRHRFAPDGYERWLGEDKDFLARALNDTRYLSRVAAEYLRLVCPGSATRVIPGQMTALLRGKFGLNDVLGLDGEKNRNDHRHHAVDACVIGVTDQRMMQRFAQANAQAREDGLTRLVEDMPLPWPTYRAHVERAVRHIWVSHKPDHGFEGAMMEETSYGILRDGTIKQRRKADGSAGREISRLIRITEPSQPQRHGVDAEGRPLPYKGYVGGSNYCLEITVNDKGKWEGQVISTFDAYRIVREGGLRQLRHSTQGQNGQALAMRLVIGDSVRLEVDEQERVMRIVKINGNNGQVFMAPVHEANVDARNSDKNEAFAYTSKIAGSFQKTKARQVTISPIGELRDPGFKG

SEQ ID NO: 212 - protein, 1218 aa, Prevotella denticola
MKASEEKLSKGLSTYMKENNLLTVGAAFAQLEDEGVRIRNNNNYRAIRSQFQHEIETIFMFQQGLSENELYERLVSEKKNIGTIFYKRPLRSQRGNVGKCTLERTKPRCAIGHPLFEKFRAWTLINNIKIRMSEEEQAEQLPMKLRFELYNDCFLAFVRAEFKFEDIRKYLEKRLGVHFSYNDKTINYKDSTSVAGCPITARFRKLLGEDWESFHVDGQKQRQAHGKNNASFHTVSYSTNDIWHFCYDAEEPEAVLSFAQDNLKWEKKKAEELVRIWSAIPQGYAMLSQKAIRNINKMLILGLKYSDAVLLAKVPEIVEITDGEILSVTEDYHRVEAQVGYEKQINNIVNALIAKYKSASEEYRFADHNYEYQLDKSDEKDIIKQIESNIGTRKWSLLDADEQTDILQKVRDKYQNFFRSHERKFVESPKLGECFEEYLMKKFPMVEGEQWKKLYHPSQIAIYRPVSAGKDRSALRLGNPDIGAIKNPTVLRVLNTLRKRVNQLLDDGLISPDETRVVVETARELNDANRKWALDNYNRIRHDENEKIKKILEEFYPKRDGISTDDIDKARYVIDQREMDYFTEEKPYNKDIKKYKLWLEQGGQCMYTGRTINLSNLFDPNSFDVEHTIPESISFDSSDMNLTLCDAHYNRFIKKNHIPADLPNYDKSVVIDGKEYSPIKPRLQRWADRVERLNRNVEYWRGQARRAQNKDRKDQCMREMHLWKMELEYWTKKLERFTITEVTDEFKNSQLVDTRVITRHAVLYLKSIFPHVDVQRGDVTAKFRKILGIQSVDEKKDRSLHSHHAIDATTLTIIPGAAKRERMLELFAKIEEVNKMLSFSGNEDRTGLKQELDGLKNQLNKEVKACRIGHNVSEIGTFINDNIIINHHVKNQALTPVRRRLRKRGHIVGGMDNPRWQTGDALRGEIHKASYYGAITQFAKDKDGKVLLKEGHPLVDPTIKFVIRRELKYKKSTADSGFASWDDLEKAIVDKELFALMKGQFPEETSFKDACEQGIYMIKKGKNGEVDTKLYRIRHIRCKTKQKNALKIKEQAYKSEKEYKRYFYAAVGDLYAMCCYTNGKTREFKIYSLYDISCHRKVGVEDIPEFITDKKGNRLMLDYKLHTGDMILLYKENPEELYDLDNVSLSKLLYKINGFENDGLRIRMVNHLVAKEAMGESVKDYAKLPDIIRCGVKTIKFLVMGENRDFVIKNGKISFNHR

SEQ ID NO: 213 - protein, 1458 aa, Fluviicola taffensis
MTKTILGLDLGTNSIGWALINQDFDNKKGEILGMGSRIIPMTQDIKDEFGKGNSISQTAERTRLRGVRRLIHRTLLRRERLHRVLNIIGFLPEHYANQIDFEKRFGKFKPESEPKISFDGNDVFLFEKSYQEMLVDFKIHQPQLVSNGKKIPHDWTIYYLRKKALSKKIEKEELAWILLNFNQKRGYYQLRGEEEEETPNKLVEFHSLKIVEVNADEPQKGKPEIWYSLVLENGWVYRRASKTPLFDWKDKIREFIVTTEINNDGTVKTDKEGTEKRSFRAPKPEDWTLQKKKTEFELSKSGNEVGAFIYESILQKPNQKIRGKLISTIERKFYKEELKTILKTQLFFHKELKDEKLYNACIEELYKNNEAHRSLLSNKGFEHLFINDILFYQRPLRSKKSQISNCPLEKRTYKKEGIEITEGIKVISKSNPIYQEFRLWQWISNLSLYCIEPTETNVTSTFLNSIEDYENLFEFLNNRKEIEQKHLLKYLLENQGFKGKLLTNELEKFRWNFVADKKYPCNETGSLLHTRLSKVKNISPDFLTKEIEHQLWHIIYSVTDKIEYEQALKTFARKNNLDVDSFFEHFKKIPPFESTYGAYSEKAIKKLLPLIRLGKYWNWEAIDSISKDRISKILSGEYDENIKNRVREKAVHLTSENNFQGLQEWLAKYIVYDRHSEGNDLGKWTSVSDLETYLKEFKQHSLRNPIVEQVITETLRVVKDIWIKHGKGTENFFDEIHVELGREMKNNSEDRKRLTNTITENENTNLRIKALLMEMMNDNDVENVRPYSPSQQEILKIYEDGALNSNIELDDEIVKISKKAEPTKSELQRYKLWLEQKYRSPYTGQVIPLNKLFTSEYEIEHVVPQSRFFDDSFSNKVICESAVNKRKDNQLGLQFIKNHSGEKVELGFGKVVQVFTEEQYLDFVKEHYSKNRSKHNKLLLEEIPEKMIERQLNDTRYISKFVSSILSNIVRSEKDDDGLNSKNILPGNGKITTELKRDWGLNDVWNDLILPRFERMNTITNSDLFTTYNDKYQKHLPTVPFEYSKGFQKKRIDHRHHAMDALVIACATRDHLNLMNNQSAKSELKRYDLQNKLRKKEPYFNQKENKQKEAFKDFIKPWGTFTEDSKNALEKIIISFKQNLRVINKATNSYESYKDEDGNLRIGKDGKPEKGLIKQKGLNWAIRKPLHKDTVSGQINLSRIKLPNGKILTATRKNLDTSFDLKTIENSITDTGIQKILKNYLLSKESPELAFSPEGLEEMNNEIEKYNNGKFHHPINKARIYELGSKFNVGQTGNRRDKFVEAAKGTNLFFAIYQDENKNRSYETIPLNEVIEHQKWRASLPKEEQEKIPLVPVNKLKGTFIFSLSPNDLVYVPSNDELERSASIDFSKLKKEQINRLYKMVSSSGSQCFFVKSEVATSVVNKMEYSSLNKMEKSIDNLMVKEICIKLKIDRLGNISKA

SEQ ID NO: 214 - protein, 1384 aa, Coriobacterium glomerans
MKLRGIEDDYSIGLDMGTSSVGWAVTDERGTLAHFKRKPTWGSRLFREAQTAAVARMPRGQRRRYVRRRWRLDLLQKLFEQQMEQADPDFFIRLRQSRLLRDDRAEEHADYRWPLFNDCKFTERDYYQRFPTIYHVRSWLMETDEQADIRLIYLALHNIVKHRGNFLREGQSLSAKSARPDEALNHLRETLRVWSSERGFECSIADNGSILAMLTHPDLSPSDRRKKIAPLFDVKSDDAAADKKLGIALAGAVIGLKTEFKNIFGDFPCEDSSIYLSNDEAVDAVRSACPDDCAELFDRLCEVYSAYVLQGLLSYAPGQTISANMVEKYRRYGEDLALLKKLVKIYAPDQYRMFFSGATYPGTGIYDAAQARGYTKYNLGPKKSEYKPSESMQYDDFRKAVEKLFAKTDARADERYRMMMDRFDKQQFLRRLKTSDNGSIYHQLHLEELKAIVENQGRFYPFLKRDADKLVSLVSFRIPYYVGPLSTRNARTDQHGENRFAWSERKPGMQDEPIFPWNWESIIDRSKSAEKFILRMTGMCTYLQQEPVLPKSSLLYEEFCVLNELNGAHWSIDGDDEHRFDAADREGIIEELFRRKRTVSYGDVAGWMERERNQIGAHVCGGQGEKGFESKLGSYIFFCKDVFKVERLEQSDYPMIERIILWNTLFEDRKILSQRLKEEYGSRLSAEQIKTICKKRFTGWGRLSEKFLTGITVQVDEDSVSIMDVLREGCPVSGKRGRAMVMMEILRDEELGFQKKVDDFNRAFFAENAQALGVNELPGSPAVRRSLNQSIRIVDEIASIAGKAPANIFIEVTRDEDPKKKGRRTKRRYNDLKDALEAFKKEDPELWRELCETAPNDMDERLSLYFMQRGKCLYSGRAIDIHQLSNAGIYEVDHIIPRTYVKDDSLENKALVYREENQRKTDMLLIDPEIRRRMSGYWRMLHEAKLIGDKKFRNLLRSRIDDKALKGFIARQLVETGQMVKLVRSLLEARYPETNIISVKASISHDLRTAAELVKCREANDFHHAHDAFLACRVGLFIQKRHPCVYENPIGLSQVVRNYVRQQADIFKRCRTIPGSSGFIVNSFMTSGFDKETGEIFKDDWDAEAEVEGIRRSLNFRQCFISRMPFEDHGVFWDATIYSPRAKKTAALPLKQGLNPSRYGSFSREQFAYFFIYKARNPRKEQTLFEFAQVPVRLSAQIRQDENALERYARELAKDQGLEFIRIERSKILKNQLIEIDGDRLCITGKEEVRNACELAFAQDEMRVIRMLVSEKPVSRECVISLFNRILLHGDQASRRLSKQLKLALLSEAFSEASDNVQRNVVLGLIAIFNGSTNMVNLSDIGGSKFAGNVRIKYKKELASPKVNVHLIDQSVTGMFERRTKIGL

SEQ ID NO: 215 - protein, 1077 aa, Neisseria bacilliformis
MQQKPQRYILGLDLGIASVGWACVWADENEHPTGLLDCGVRTFERAEVPKTGDSLALARRQARSVRRLIRRRAHRLLRLRRLLKREGVLLSADFNENGLVRGLPIDAWALRVAGLDRKLSNKEWAAVLLHLVKHRGYLSQRKNETQSKDKELGRLLAGVNGNREALQNRSDEYRTAAELAVKKFAAENNGSLRNKGGDYSHTFDRKDLQRELHLLFERQRALDNPFTSSEMEAAVDELLMKQRSALQGEAVLKMLGRCTFEPSEYKAAKNTYSAERFVWLTKLNNLRIQYNGEERALSEAERRLLLDEPYQKAKLTYKQVRTILELPESAVFKGLRYGHGEDGLKAESGTLMEMKAYHAVRKALKDAGLEGEWENRIRNPELLDAIGTAFSLYKTDEDIRANLAAFRLSENVLEALLAGLNFDKFVHLSLKALAKILPLMEQGMRYDEACKEAYGDHYGAKEQEDHRLLPPFVADDIRNPVVFRTLTQARKIVNEIVRRYGSPLRVHIETGREVGKSFSDRKEIEKRQEENRKERERAAAHFKELFPNFAGEPKAQDILKLRLYEQQHGKCLYSGKEIDLRRLPEKGYVEIDHALPFSRTWDDSFNNKVLVLGKENQDKRNRTPYEYLDGKGNSGAWRAFAERVSGCRFPYAKKQRLLTQKLDEKTEQGFLERNLNDTRYVARFLCQFIEEKMHLEGAGKKRVFASNGQITALLRGFWGLKKVREENDRHHALDAVVVACSSVSMQQKITRHFRYREELEHIDRETGEVIHGFPQPWEFFRQEVMTRVFSDDPVSELAEKLDSRPEAVHEFVTPLFVSRAPHRKVTGQGHLETIRSAKRLDEKISVVKLPLTQLKTKDIERIVGYPNREPALYDALAARLAAFKDDPAKAFSEPFYKTGKDGKCGVLVKAVRVENVQKSGLLVRKDESGKMQGVADNATMVRVDVFGKNGKNYLVPVYAWQVEKGELPNRAVVAYADEEDWDEMDDSFEFKFSLYPNDLVEVVTKKDKFFGYYSGFNRATGAINIKEHDLSKSKVKNGVYEGIGVKTAQSFQKYQVDTLGKTIRLCKPEKRMGFKKK

SEQ ID NO: 216 - protein, 1029 aa, Alicycliphilus denitrificans; identical to SEQ ID NO: 193

SEQ ID NO: 217 - protein, 1122 aa, Streptococcus suis; identical to SEQ ID NO: 87

SEQ ID NO: 218 - protein, 1428 aa, Parasutterella excrementihominis
MGKTHIIGVGLDLGGTYTGTFITSHPSDEAEHRDHSSAFTVVNSEKLSFSSKSRTAVRHRVRSYKGFDLRRRLLLLVAEYQLLQKKQTLAPEERENLRIALSGYLKRRGYARTEAETDTSVLESLDPSVFSSAPSFTNFFNDSEPLNIQWEAIANSPETTKALNKELSGQKEADFKKYIKTSFPEYSAKEILANYVEGRRAILDASKYIANLQSLGHKHRSKYLSDILQDMKRDSRITRLSEAFGSTDNLWRIIGNISNLQERAVRWYFNDAKFEQGQEQLDAVKLKNVLVRALKYLRSDDKEWSASQKQIIQSLEQSGDVLDVLAGLDPDRTIPPYEDQNNRRPPEDQTLYLNPKALSSEYGEKWKSWANKFAGAYPLLTEDLTEILKNTDRKSRIKIRSDVLPDSDYRLAYILQRAFDRSIALDECSIRRTAEDFENGVVIKNEKLEDVLSGHQLEEFLEFANRYYQETAKAKNGLWFPENALLERADLHPPMKNKILNVIVGQALGVSPAEGTDFIEEIWNSKVKGRSTVRSICNAIENERKTYGPYFSEDYKFVKTALKEGKTEKELSKKFAAVIKVLKMVSEVVPFIGKELRLSDEAQSKFDNLYSLAQLYNLIETERNGFSKVSLAAHLENAWRMTMTDGSAQCCRLPADCVRPFDGFIRKAIDRNSWEVAKRIAEEVKKSVDFTNGTVKIPVAIEANSFNFTASLTDLKYIQLKEQKLKKKLEDIQRNEENQEKRWLSKEERIRADSHGICAYTGRPLDDVGEIDHIIPRSLTLKKSESIYNSEVNLIFVSAQGNQEKKNNIYLLSNLAKNYLAAVFGTSDLSQITNEIESTVLQLKAAGRLGYFDLLSEKERACARHALFLNSDSEARRAVIDVLGSRRKASVNGTQAWFVRSIFSKVRQALAAWTQETGNELIFDAISVPAADSSEMRKRFAEYRPEFRKPKVQPVASHSIDAMCIYLAACSDPFKTKRMGSQLAIYEPINFDNLFTGSCQVIQNTPRNFSDKTNIANSPIFKETIYAERFLDIIVSRGEIFIGYPSNMPFEEKPNRISIGGKDPFSILSVLGAYLDKAPSSEKEKLTIYRVVKNKAFELFSKVAGSKFTAEEDKAAKILEALHFVTVKQDVAATVSDLIKSKKELSKDSIENLAKQKGCLKKVEYSSKEFKFKGSLIIPAAVEWGKVLWNVFKENTAEELKDENALRKALEAAWPSSFGTRNLHSKAKRVFSLPVVATQSGAVRIRRKTAFGDFVYQSQDTNNLYSSFPVKNGKLDWSSPIIHPALQNRNLTAYGYRFVDHDRSISMSEFREVYNKDDLMRIELAQGTSSRRYLRVEMPGEKFLAWFGENSISLGSSFKFSVSEVFDNKIYTENAEFTKFLPKPREDNKHNGTIFFELVGPRVIFNYIVGGAASSLKEIFSEAGKERS

SEQ ID NO: 219 - protein, 1371 aa, Lactobacillus buchneri
MKVNNYHIGLDIGTSSIGWVAIGEDGKPLRIKGKTAIGARLFQEGNPAADRRMFRTTRRRLSRRKWRLKLLEEIFDPYITPVDSTFFARLKQSNLSPKDSRKEFKGSMLFPDLTDMQYHKDYPTIYHLRHALMTQDEKFDIRMVYLAIHHIVKYRGNFLNSTPVDSFKASKVNFVDQFKKLNELYTAINPEESFQINLANSEDIGHQFLDPSIRKFDKKKQIPKIVPVSVDDKATDKINGKIASEIINAILGYKSKLDVVVQCTPVDSKSWALKFDEEDIDAKLQKILPEMDENQQSIIAILQNLYSQVTLNQIVPNGMSLSESMIEKYNDHHDHLKLYKKIIDQLADPKKKAALKKAYSQYVGDDGKVIEQADFWSSVKKNLDDSDLSKQIMDLIDAEKFMPKQRTSQNGVIPHQLHQRELDEIIEHQSKYYPWLAEINPNKHDLHLAKYKIEELVAFRVPYYVGPMITPDDQAKSAETVFSWMERKGKEAGQITPWNFDEKVDRNASANRFIKRMTTKDTYLIGEDVLPDESLLYEKFKVLNELNMVRVNGKLLKVADKQAIFQDLFENYKHISVKKLQNYIKSKTGLPSDPEISGLSDPEYFNNSLGTYNDFKKLFGNKVDEPDLQDDFEKIVEWSTVFEDKRILREKLNEITWLSDQQKDVLESSRYQGWGRLSKKLLTGIVNDQGERIIDELWNTNKNFMQIQSDNDFAKRIHEANADQMKAVDVEDVLADAYTSPQNKKAIRQVVKVVDDIQKAMGGVAPKYISIEFTRSEDRNPRRTISRQRQLENTLKDTAKSLAKSINPELLSELDNAAKSKKGLTDRLYLYFTQLGKDIYTGKPINIDEISTYDIDHILPQAFVKDDSLNNRVLVSKAINNGKSDNVPVQLFGAKMGHFWKQLAEAGLISKRKLKNLQTDPDTISKYAMHGFIRRQLVETSQVIKLVANILGDKYRNDNTKIIEITARMNHQMRDEFGFIKNREINDYHHAFDAYLTAFLGRYLYHRYIKLRPYFVYGDFKKFKEDKVTMRNFNFLHDLTDDTQEKIADAETGEVIWDRENSIQQLKDVYHYKFMLISHEVYTLRGAMFNQTVYPASDAGKRKLIPIKADRPINVYGGYSGSADAYMAIVRIHNKKGDKYRVVGVPMRARDRLDAAKKVSDADCDRALKDVLTPQLTKTKKSRKTGEITQVVEDFEIVLGKVMYRQLMIDGDKKFMLGSSTYQYNAKQLVLSDQSVKTLASKGRLDPLQESMDYNNVYTEILDKVNQYFSLYDMNKFRHKLNLGFSKFISFPNHNVFDGNTKASSGKREILEEVLNGLHANPTFGNLKDIGITTPFGQLQQPNGILLSDEAKIRYQSPTGLFERTVSLKDL

SEQ ID NO: 220 - protein, 1090 aa, Sphingomonas sp.
MDWRLGLDLGANSLGWAALRLDRAGDPIGILAMGSRIFSDGRDPKSGASLAVDRRAARAMRRRRDRFKQRQAALLKYLIRDGLFPADQADRQRLADEDPYALRARALDEELSLFEIGRALFHLNQRRGFQSNRKADRGQDDEAGKIAVGVDRLNQQMEEQGARTLGEFLHQRRRAATDANHIPSVRTRLRPETGEGAKGDGYDFYPSRALIAEEFEEIWAAQAPHYPDTLTQQVHDRLYEIIFHQRPLRAPQVGQCTLVAGETRLPKAHPLFQKRRLLEEINALMIVRPGEIAQRLTPEERDTLYLKLKDKRTVSFATLRKTLKLDSAARFNKESENRTELKGDEVAAELGAKTRLGTRWQHLSGDQQWEVVHRLMALESQADEAAFRDWISQTYDLLPEQAAAVLGARLPQGHGRFGPTATTTLIDSLLHDRTEDGRVVVYSEAVQRSGLGHHSDLRHDRDDEDVTELPYYGVALERHIMPGTAEPTDPEEMRIGRLTNPTVHIGLNQLRHVVNRLIRAYGPPKEIAIELARELKLSEDEKKKRNSENRDNRLAAEGRSKKLEEIRQRDTGANRALLKLWEELNPGNVLDRRCIYTGEQISIDMLFSDRVEVDHILPFAQTLDDSNGNKLLCLREANREKRRRSPYEAWGHTDRWPDIAERASRLPKPKRWRFEPDAMQRFATEDGFLARHLVDTQYLGRLAREYLSWLYPGRGEGSGHVWVSPGRLTEMVRRKLGLNDLLPDHNFGGGADQPKNRLDHRHHAIDALVVAIVDRGMLQAIARASGQDGSEGRERIHIPAPWDGFRDDLRVAVNGIIVSHRPDHGTVAKAGLARGRDQTAGRLHNDTAYGLTGETDAKGNSIVVRRIPLSAIKKPADIARVRDPLLRNALAEFTKGLDGKAFEARIGRFHELGPLLYRGIRRVRVVETLTVIPIRDAEGRAYKGYKGDSNYRYDVWEMPDGKWRCQVVSMFDAHQSTEQARPHPAARKILSLQRNDILAIERTEGDRELVRVVKFSEKQFAVAPPHEGGSLKTRDGNADDPFRYLYPSPNTLKGWRARQVRIDELGRVLDPGFPARKSVRRTRPRAAPVD

SEQ ID NO: 221 - protein, 1000 aa, Kingella kingae
MARAQRRLISRRANRMNKLRRLLKQENVLQANDYDEKGLIIGLPNQAWELRAQGLDRKLEPKEWAAVLINLVKHRGYLSQRKNESQTADKELGALLSGMNHNHQLLQSQSNQYRTPAELAIKQFATQDGHIRNQRGAYTHTFNRLDLQNELNQLFDAQTRLGNPHVSGSLKTAINDLLMNQKAALSGDAILEMLGRCTFEPSEYKAAKNTYSAERFVWLGKLTNLRIQDNGLESALSREQRELLLNEPYNKTKLTYQQVRKLLRLPETAFFKGLRYGKDNAESATFMEMKSYHAIRKSLENKSLKSEWEKLKTQPKLLDLIGTAFSIYKTDDEIAGCLKNQLPENVIIALQEQLNFSNFMELSLKALEKLLPLMEQGLRYDEACTQIYGNRHEKIADKTEKFLPNIPADKLRNPVVLRTLTQARKVINAIIRRYGSPARVHIETGREVGKSFSDRDKLKKQQEENQEQRRRAIDEWKQFFPNAAHEPKAVDILKLRLYQLQQGKCLYSGLPIDVRRLPEKGYVEIDHALPFSRTWDDSFNNKILVLASENQNKGNQTPYEYLRGADNSESWRLFVENVQNCQFSPNKKQKIMAKQLDEKGFLERNLNDTRYVSRFLCQFISEHLHLTGKGKKRVFASNGQITALLRGRWGLSKNREENDRHHAVDAVVVACSTVAMQQKITQFVRYQKGNVFTGERIDKETGEVISIHFPTPWEHFREEVMIRVFDDNPLRTLPEKLPNRPEALHEYVMPLFVSRMPTRKMTGQGHKETIKSAKRLDEKISVLRVPLTQLKLNDLENMVNREREPALYEALKARLEQFKNDPAKAFAEPFFKQGGQQVKAVRVEIVQKSGMLLRKINGVADNGSMVRVDVFEKSGKFYLVPIYAWQVAEGILPNYAVVAHKDESDWILMDESYHFKFALYKNDLLEVQTKKGGIMGYFASLDRATGAITIREHDRDKKKCKDGEHRSIGVKMASSFKKLQVDELGKNIHETRSRKRPNIG

SEQ ID NO: 222 - protein, 1130 aa, Streptococcus pasteurianus
MTNGKILGLDIGIASVGVGIIEAKTGKVVHANSRLFSAANAENNAERRGFRGSRRLNRRKKHRVKRVRDLFEKYGIVTDFRNLNLNPYELRVKGLTEQLKNEELFAALRTISKRRGISYLDDAEDDSTGSTDYAKSIDENRRLLKNKTPGQIQLERLEKYGQLRGNFTVYDENGEAHRLINVFSTSDYEKEARKILETQADYNKKITAEFIDDYVEILTQKRKYYHGPGNEKSRTDYGRFRTDGTTLENIFGILIGKCNFYPDEYRASKASYTAQEYNFLNDLNNLKVSTETGKLSTEQKESLVEFAKNTATLGPAKLLKEIAKILDCKVDEIKGYREDDKGKPDLHTFEPYRKLKFNLESINIDDLSREVIDKLADILTLNTEREGIEDAIKRNLPNQFTEEQISEIIKVRKSQSTAFNKGWHSFSAKLMNELIPELYATSDEQMTILTRLEKFKVNKKSSKNTKTIDEKEVTDEIYNPVVAKSVRQTIKIINAAVKKYGDFDKIVIEMPRDKNADDEKKFIDKRNKENKKEKDDALKRAAYLYNSSDKLPDEVFHGNKQLETKIRLWYQQGERCLYSGKPISIQELVHNSNNFEIDHILPLSLSFDDSLANKVLVYAWTNQEKGQKTPYQVIDSMDAAWSFREMKDYVLKQKGLGKKKRDYLLTTENIDKIEVKKKFIERNLVDTRYASRVVLNSLQSALRELGKDTKVSVVRGQFTSQLRRKWKIDKSRETYHHHAVDALIIAASSQLKLWEKQDNPMFVDYGKNQVVDKQTGEILSVSDDEYKELVFQPPYQGFVNTISSKGFEDEILFSYQVDSKYNRKVSDATIYSTRKAKIGKDKKEETYVLGKIKDIYSQNGFDTFIKKYNKDKTQFLMYQKDSLTWENVIEVILRDYPTTKKSEDGKNDVKCNPFEEYRRENGLICKYSKKGKGTPIKSLKYYDKKLGNCIDITPEESRNKVILQSINPWRADVYFNPETLKYELMGLKYSDLSFEKGTGNYHISQEKYDAIKEKEGIGKKSEFKFTLYRNDLILIKDIASGEQEIYRFLSRTMPNVNHYVELKPYDKEKFDNVQELVEALGEADKVGRCIKGLNKPNISIYKVRTDVLGNKYFVKKKGDKPKLDFKNNKK

SEQ ID NO: 223 - protein, 1119 aa, Lactobacillus coryniformis
MGYRIGLDVGITSTGYAVLKTDKNGLPYKILTLDSVIYPRAENPQTGASLAEPRRIKRGLRRRTRRTKFRKQRTQQLFIHSGLLSKPEIEQILATPQAKYSVYELRVAGLDRRLTNSELFRVLYFFIGHRGFKSNRKAELNPENEADKKQMGQLLNSIEEIRKAIAEKGYRTVGELYLKDPKYNDHKRNKGYIDGYLSTPNRQMLVDEIKQILDKQRELGNEKLTDEFYATYLLGDENRAGIFQAQRDFDEGPGAGPYAGDQIKKMVGKDIFEPTEDRAAKATYTFQYFNLLQKMTSLNYQNTTGDTWHTLNGLDRQAIIDAVFAKAEKPTKTYKPTDFGELRKLLKLPDDARFNLVNYGSLQTQKEIETVEKKTRFVDFKAYHDLVKVLPEEMWQSRQLLDHIGTALTLYSSDKRRRRYFAEELNLPAELIEKLLPLNFSKFGHLSIKSMQNIIPYLEMGQVYSEATTNTGYDFRKKQISKDTIREEITNPVVRRAVTKTIKIVEQIIRRYGKPDGINIELARELGRNFKERGDIQKRQDKNRQTNDKIAAELTELGIPVNGQNIIRYKLHKEQNGVDPYTGDQIPFERAFSEGYEVDHIIPYSISWDDSYTNKVLTSAKCNREKGNRIPMVYLANNEQRLNALTNIADNIIRNSRKRQKLLKQKLSDEELKDWKQRNINDTRFITRVLYNYFRQAIEFNPELEKKQRVLPLNGEVTSKIRSRWGFLKVREDGDLHHAIDATVIAAITPKFIQQVTKYSQHQEVKNNQALWHDAEIKDAEYAAEAQRMDADLFNKIFNGFPLPWPEFLDELLARISDNPVEMMKSRSWNTYTPIEIAKLKPVFVVRLANHKISGPAHLDTIRSAKLFDEKGIVLSRVSITKLKINKKGQVATGDGIYDPENSNNGDKVVYSAIRQALEAHNGSGELAFPDGYLEYVDHGTKKLVRKVRVAKKVSLPVRLKNKAAADNGSMVRIDVFNTGKKFVFVPIYIKDTVEQVLPNKAIARGKSLWYQITESDQFCFSLYPGDMVHIESKTGIKPKYSNKENNTSVVPIKNFYGYFDGADIATASILVRAHDSSYTARSIGIAGLLKFEKYQVDYFGRYHKVHEKKRQLFVKRDE

SEQ ID NO: 224 - protein, 1126 aa, Lactobacillus farciminis
MADRISLGLDIGVASVGFSVLDIDKGKVIELGARLFSATVAAGNQDRRDMRGARRLLNRNKQRRQDTGKLFKKFGLIDDFDKGSFYDNFNQNLNPYELRVKGLTEQLTKEELAESLYQIVKHRGISYALKDADVDEGGTDYSVSLKINSQELAEKTPAQIQLQRLNDYGKVRGQVVIGDDPDNQKVLLNVFPTSAYEKEAKQIIATQQQFYPESLTDKFTEEYCQILTRKRDYFVGPGNEKSRTDYGIYKTDGRTLDNLFEELIGHDKIYPEELRASAASYTAQLFNVLNDLNNLRILNYEDGKLTKEDKEKIIAEIKNNTTTINMLNVIKKVAGCSKDDIKGFRVNEKDKPEISSMPVYRKIHKDLLKAGVDISDWPVEFIDELSFILTLNTENGEIRKQLNNRLAPKFDFLNADLIQLIIDNKDSFEIKTNNKWHRFSVKTMNKLIPEMMERPVEQMTLLNEMGLVKKDKKRFENNKYLPYKEIAKDIFNPVASKSVREALKIVNAVLKKYGHIDYLVVEMPRDKNLKEEQDNIKEFQNKNKKAKDAAFEAFVKSVGSEQRVKEALSKNRKLQMKMRLWYQQQEIDPYNGKTIDATDLINNPDKFEIDHIIPQSISFYDSINNKTLCFASMNQVKGQKTPYEFMLEGHGQSYDKFKATVMANKNFGKAKRANYLFEENVSDIETRKRFLSRNLVDTRYSSRVVLNSLQDFFREKSADTKVTVIRGKFTSNMRKHWHIDKTRETFHHHAIDASIIAATPFLRMWKKGGTIFPVKVGEESIDIETGEILDDKNFDKAMYEEPYSGFVSEIMNADDRIKFSHQVDKKMNRKVSDATIYSTRTGKLAKDKKDAEYIVAKVKDIYSVDGFKKFKKVYDKDKTKFLLYKYDPRTFSKLERIISDCPDKVEKVQTNGKVKAVDISPFEMYRRDHGMIKKYSKKGNGPAIKQLKYLDKKLGSHIDITPANANGKHVILQSLKPWRTDVYLNHETGEYEIMGIKYSDLKFNKNEGYGIKKDKYLEIKKVEEVSEKSEFMFSLYRKDRVKVQDMKTGESVELLFWSRNFSNKKYAELKPISQAENDKKLPVYGKGRLIKRLIPKNCKIWKVNTTILGDPYYLEKESDSPKDILD

SEQ ID NO: 225 - protein, 1380 aa, Eggerthella sp.
MNLRHVGNYNIGLDMGTASVGWAAIDEQGELLHFKGKPTWGSRLFDSANTAATARMPRGQRRRYIRRRWRLDLLQKFFSEEMAEKDPEFFIRLRQSSLWPEDREGGHTAYHWPLFNDSDFNEKEYYEKFPTIFHLRQWLMETDEKADIRLIYLAFHNIVKHRGNFLQENNDSLSAQNANMRESLESFCIALEEWCDEKELTCSCDPQKLEHLFKEVKYRSDIRDGFAALLGLACSGENEVDVKAMAKEMGKAIVGYKADFSKIFTECDKEGSSFRLSDDEGPEAFLDICPDDGIALFEAIQMVYSSFILTGMLTEKGLSLSKISAYNQYGQDLESLKALVKEYVPNEYSSFFRGPTYSGSTEYDPSKAQGYTRYNLGPSKKGSGAKPMAYEDFKKSVEQLFANTNAINDERYKEMMGRFAEEKFLRRLRTSDNGRIPFQLNLEEMTAIIINQGKYYPFLLEQQEKLESLVRFRIPYYVGPLTRINARLDSKGNACFAWSKRKDGMDSASIKPWNWDEVIDKHASAQAFIERMTGTCTYLRGEPVLPRCSLLYEEYCVLNELNGARWTQDGDKFIRFDYKDRSDIIEELFKKRRGRIQYAAVADWMKQERSHANVHVSGGQGENAFESRLSSYHFFCNDVFGVDELPGSYVDMVEEIILWSTLFEDRSILREEIQRKYGDVLNEEQIKTICKKRFSGWGRLSRKLLCSLKAQTDNGPKSIMDILQEGDQNNGRVGRAMVFQEILHDEQLGFEQKIEEENTQSMLEGENLLIEDLPGSPAIRRSINQAVRIVDEIVGIAGHAPDNIFIEVTREDDTKKKGKRTTTRYSNIQKALEALKEEGAEALRELKTYKHNELDKRLSLYFMQNGKSLYSGIPLDIRRLSEYQIDHIIPQSYIKDDSYENMALVLPGENQSKADNLLISQDIRIKMKATWTALHKAGLMGDKKYNNLMNSSISDAKMKGFINRQLVETSQSVKLTQMMLSQKYPGAKVRPIKASISSQLRDACDLVKCREANDYHHAHDAYLACQVGRFVLKRHSSMFDNPIGMTKVIRDFVKRQGQEFKRNGKLPAYASRSGFIVQSFMRSGFDAETGELLRDDWNAPFEIARIKRCLNYRDCYISRMPMEDSGAFWDATIYSPKAGKKGALPVKQGLPVEKYGSYSREQFAYFFVYKAYNPKKKAYRLEFEAVPVRVASAVETRENALEEYAKSVAKQAGLEFVEVARPKVYKYQLIELGEDRLYITGKREVRNASQLAFSLDEIDLLKRLAEGEETSSEERERLFDVLIEKYARYAPRLARQLSVDSMSATFETLNAEEQLGILLSLVEIANGKRNMIDLSSAGGSKNAGCMNPTFSSELSSPGSNFTFIDQSVTGMFERRQRLEL

SEQ ID NO: 226 - protein, 1430 aa, Capnocytophaga canimorsus
MKHILGLDLGTNSIGWAVVKEAQNDNEQSEIVDVGVRVNPLTTDEKTNFEKGKPISTNADRTLKRSARRNLQRYKLRRKELIELLKEHQLISTDTILTENGKGTTFQTLELRAKSAKEKISLEELARVFLTINKKRGYKSSRKAKNEDEGQLIDGMEIAKRLYEENLTTGQLSLQLLKEGKKSLPDYYRSDLQFELDKVWNFQKQFHSHILTDEFYAQLKGKGQRATSALFLAKYQIYTAENKGSREDKKLQAYQWRVDALSKELTREQLAFVITEINNNLNNSSGYLGAISDRSKELYFNNETVGEYLWKQIAANPHTSLKNQVFYRQDYLDEFEQIWKTQSAFYPEILTDELKKELRDVVIFYQRKLKSQKSLVSFCEFENKEIEIKKEDGTSTKKVIGLKVAPKSSPLFQEFKIWQNLNNVLIRKKGSKTKKVDKNQQAVLFEEEKTIFELDLEAKQALFNELNLKGNLKAYYCLEILGYSPKEWEMNYSVLEGNRTNKALYEAYLKITDLEGYDAKNHLKVKLNKDEVELDDLKVPASEIKDMVQAIFKEAGINTDILHFNAELDGKDFENQASYQLWHLLYSYEGDDSKSGNELLYKLLETKFGFKKEYAQILANVSLSDDYGSLSTKAMRKIHPYIKENKFSTACELAGYRHSKHSLTKEENDNRVLKDSLEVLKKNSLRQPVVEKILNQMINLVNALLKKYRTENPNFKFDEIRIELARELKKNAEERANMTVNINKAKTEHEKIIKILKNEFGLPNPTRNDIIRYRLYEELKANGYKDLYTNEYIEKQDLFTKNIDIEHIIPKSRVFDDSFSNKTLSFRKTNLDKGERTAFDYIESKFGADKLEEYVARVEDLYKNNIISKAKYQKLLKKESEIGDGFVERDLRETQYIAKKAKEILLQITPNVLSTSGGITDRLREDWDLINVMKELNLPKYRALGLTQMEDRKYGQQVEVIIDWTKRNDHRHHAMDALTVAFTKHNHIQYLNYLNARKNEKHREHSNIMGIQQLETIKVTDKNGNEKRVFKAPMPNFRQVTKAFLENVLISHKAKNKVVTKNKNKVAGSNKVQEVLTPRGQLHKETVYGKYQYYVQKEEKIGGKFDLETIKKVANPLYQSLLKKRLEENGGDPKKAFTGKNSLAKNPIYLDDAQTEQLPEKVKLVWLENSFSIRKDITPENFKDEKLIDKILDEGVKRILKERLQSFGNDAKKAFSDLDKNPIWLNKEKGIAIKRVAISGVANAEPLHTKKDHLGKEILDKEGKSIPVDFISTGNNHHVAVYRDEKGNLQEKVVSVFEAVVRANQGLPIIDKTYNQHLGWEFLFTMKQNEMFVFSNESTGFNPNDIDLLDPKNKKIISPNLFRVQKFSKLQYGNSFVREFVFRHHLETTVEDRKELQGITYKQMKNSAFFNDIIKVRINHLGGIVSVGEY

SEQ ID NO: 227 - protein, 1348 aa, Finegoldia magna
MKSEKKYYIGLDVGTNSVGWAVTDEFYNILRAKGKDLWGVRLFEKAKTAADTRTFRSGRRRNDRKGVRLQILREIFEDEIKKVDKDFYDRLDESKFWAEDKKVSGKYSLFNDKNFSDKQYFEKFPTIFHLRKYLMEEHGKVDIRYYFLAINQMMKRRGHFLIDGQISHVTDDKPLKQQLILLINDLLKIELEEEFMDSIFEILADVNEKKTEKKNILKELINAQDFNKQEGKILYSIFESIVTGKAKIKNIISDEDILEKIKEDNKEDFVLTGDSYEENLQYFEEVLQENITLFNTLKSAYDFVILQSILKGKSTLSDAQVERYDEHKKDLEILKKVIKKYDEDGKLFKQVFKEDNGNGYVSYIGYYLNKNKKITAKKKISNIEFTKYVKGILEKQCDCEDEDVKYLLGKIEQENFLLKQISSINSVIPHQIHLFELDKILENLAKYYPSFNNKKEEFTKIEKIRKTFTFRIPYYVGPLNDYHKNNGGNAWIFRNKGEKIRPWNFEKIVDLHKSEEEFIKRMLNQCTYLPEETVLPKSSILYSEYMVLNELNNLRINGKPIDTDVKLKLIEELFKKKTKVTLKSIRDYMIRNNFADKEDFDNSEKNLEIVSNMKSYIDFNNILGDKFELEMVEDLIEKITIHTGNKKLLKKYIEETYPDLSSSQIQKIINLKYKDWGRLSRKLLDGITGTNIETGEIDTVINFLRNSSDNLMQIIGSQNYSFNNDIDKLRKKYIPQEISYEVVENLYVSPSVKKMIWQVIRITEEITKVMGYDPDKIFIEMAKSEEGKKTTISRKNKLLALYKAIKKDERDSQYEKLLTGLNKLDDSDLRSRKLYLYYTQMGRDMYTGEKIDLDKLFDSTHYDKDHIIPQSMKKDDSIINNLVLVNKNANQTTKGNIYPVPSSIRNNPKIYNYWKYLMEKEFISKEKYNRLIRNTPLTNEELGGFINRQLVETRQSTKAIKELFEKFYKKSKIIPVKAILASDLRKDMNTLKSREVNDLHHAHDAFLNIVAGDVWNREFTSNPINYVKENREGDKVKYSLSKYFTRPRKSKGKVIWTPEKGRKLIVDTLNKPSVLISNESHVKKGELFNATIAGKKDYKKGKIYLPLKKDDRLQDVSKYGGYKAINGAFFFLVEHTKSKKRIRSIELFPLHLLSKFYEDKNTVLDYAINVLQLQDPKIIIDKINYRTEIIIDNFSYLISTKSNDGSITVKPNEQMYWRVDEISNLKKIENKYKKDAILTEEDRKIMESYIDKIYQQFKAGKYKNRRTTDTIIEKYEIIDLDTLDNKQLYQLLVAFISLSYKTSNNAVDFTVIGLGTECGKPRITNLPDNTYLVYKSITGIYEKRIRIK

SEQ ID NO: 228 - protein, 1352 aa, Megasphaera sp.
MKKRNREEYYVGLDIGTSSVGWAVATPDYRIPKFRGHKMWGSRLFAEGKRAAERRQFRTNRRRLARRRDRLQILEELFAEEMAKVDNTFFMRLKESKFFLEDKTVKEKHILFSTDKFDADRFYKDNPTIYHVRKRLMEEEPQDIRELFLAVHHILKYRGHFLFAGSLEQNGASIEELVRTLLGKQGLAILDDTIDSNEMVNILKNTGETKSDRKKDVQELWNPLKDKVKKAQAAEMAGLVLGLKSDISKLFANSDYKDLDSSIKNINFSSGDYEEKRDDYANSIGDDIVLLDTMKALYDTLILSQILQGKRSISAAKVEDYNTHKEQLRALKAILKPHKRLYNEMFRENNKKDLSNYVAYISSYSEGKRVNREGFYKYVQAVLKQVDDSDSKQAILEAIRLETFLPLLRVKDNAVIPHQIHQAELEAILETARKKYNFLNDVSDGVSVKDKIIQLFTFRIPYYVGPLNPHSGETVADRKQGTGWVVRKQRGKVYPWNFADMVDVKASAEAFITNLTNKCTYLIGEDVLPKRSLLYSEFMLLNELNMIKYDGHELPVAIKQLYIEQVFKQEHKKQTKGRVLDFLKRNGLITGSATAVITGMDDAIKGDLQSYRDMVRIFGAGFDHSMAERIIRWVTLFGEAKDILENKIREVYGNSISDSQMRAIKKLKYADWGRLSQAFLIAVKGCDKSGVERNIITCLRASSQNLMEILSDQGTYIKQIKAWNHQHTTNMMDTLDYQLVDDLYVAPSVKRSIWQSLCIVEELVKIMGQAPKKIFVEVTRTKQAEKTKKDSRKKRLVELYTAIGKEGAAWKKEIEAHQAGDFRRKKLYLYYTQMGRCMYSNEPIAMDALFTSAYDIDHIYPQSLTKDGSWDNLVLVKSQLNKEKSDQYPLRPAIREKNKAHWQYLCRAGFISEKKYERLMRTTELTAEELSGFIARQLVETSQATKAVTGLLERIYTNTEICFVKAETVSQFRHQHNFIKIRELNNYHHAKDAYLNIVVGNVYHEKFTKNPWEFIARSTERRPYNLNRMYDFDLLKQGRVIWQVPKSLETVQAMMKSNDVRITKKLLVQKGELYDATITKAHKAKEGTYFPLKGADARLRDVHRYGGYEKIKIAYYSVFSCREKASNTIHTLIIPIPVYKAGLLQTEADLTAYAWQTKQKTKPIKDIYSAITPIYKKLCINTVVKIDGFKYFLGGKTGDYMWLDPAIPVVLDEQAAAYLKAISKVGRADDVENTAQAIDLITAEANEAFYDVLLKKMEAKIFAKAYQTIVEKLASETARERFRELSIGAQCSCLLEILNLLANNKTTFTFFKDKMGVTMSRRKQPMDLTKLEECIVYETSITGLYEKAVSLL

SEQ ID NO: 229 - protein, 650 aa, Haemophilus pittmaniae
MENKNLHYILGLDLGIASVGWAVVEIDKEENPLCLIDVGVRTFERAEVPKTGESLALSRRLARSARRLTQRRVARLKKAKRLLKLENILLSTDERLPHQVWQLRVEGLDRKLKRQEWAAVLLHLIKHRGYLSQRKNESKSENKELGALLSGVASNHELLQQTTYRTPAELAVKKFEVEEGHIRNQQGAYTHTFSRLDLLAEMELLFSRQQHFGNPFASEKLLENLTALLMWQKPALSGEAILKMLGKCTFEDEYKAAKNTYTAERFVWITKLNNLRIQENGLERALNDNERLILIEQPYEKAKLTYAQVRSILNLSDEAIFKGLRYSGEDKKAIETKTTLMEMKAYHQIRKVLEGNNLKAEWTELKENSTLLDEIGTAFSLYKTDEDISTYLAGKLSQPVLNALLENLSFDKFIQLSLKALYKLLPLMQQGLRYDEACHEMYGDHYGKKTYGKKTEENHYFLPQIPADEIRNPVVLRTLTQARKVINGVVRLYGSPARIHIETGREVGKSYKDRRELEKRQEENRKQRENAIKEFKEYFPHFAGEPKAKDILKMRLYKQQNAKCLYSGKPIELHRLLEKGYVEVDHALPFSRTWDDSFNNKVLVLANENQNKGNLTPFEWLDGKHNSERWRAFKALVETSAFPYAKNNAS

SEQ ID NO: 230 - protein, 1062 aa, Ralstonia syzygii
MAEKQHRWGLDIGTNSIGWAVIALIEGRPAGLVATGSRIFSDGRNPKDGSSLAVERRGPRQMRRRRDRYLRRRDRFMQALINVGLMPGDAAARKALVTENPYVLRQRGLDQALTLPEFGRALFHLNQRRGFQSNRKTDRATAKESGKVKNAIAAFRAGMGNARTVGEALARRLEDGRPVRARMVGQGKDEHYELYIAREWIAQEFDALWASQQRFHAEVLADAARDRLRAILLFQRKLLPVPVGKCFLEPNQPRVAAALPSAQRFRLMQELNHLRVMTLADKRERPLSFQERNDLLAQLVARPKCGFDMLRKIVFGANKEAYRFTIESERRKELKGCDTAAKLAKVNALGTRWQALSLDEQDRLVCLLLDGENDAVLADALREHYGLTDAQIDTLLGLSFEDGHMRLGRSALLRVLDALESGRDEQGLPLSYDKAVVAAGYPAHTADLENGERDALPYYGELLWRYTQDAPTAKNDAERKFGKIANPTVHIGLNQLRKLVNALIQRYGKPAQIVVELARNLKAGLEEKERIKKQQTANLERNERIRQKLQDAGVPDNRENRLRMRLFEELGQGNGLGTPCIYSGRQISLQRLFSNDVQVDHILPFSKTLDDSFANKVLAQHDANRYKGNRGPFEAFGANRDGYAWDDIRARAAVLPRNKRNRFAETAMQDWLHNETDFLARQLTDTAYLSRVARQYLTAICSKDDVYVSPGRLTAMLRAKWGLNRVLDGVMEEQGRPAVKNRDDHRHHAIDAVVIGATDRAMLQQVATLAARAREQDAERLIGDMPTPWPNFLEDVRAAVARCVVSHKPDHGPEGGLHNDTAYGIVAGPFEDGRYRVRHRVSLFDLKPGDLSNVRCDAPLQAELEPIFEQDDARAREVALTALAERYRQRKVWLEELMSVLPIRPRGEDGKTLPDSAPYKAYKGDSNYCYELFINERGRWDGELISTFRANQAAYRRFRNDPARFRRYTAGGRPLLMRLCINDYIAVGTAAERTIFRVVKMSENKITLAEHFEGGTLKQRDADKDDPFKYLTKSPGALRDLGARRIFVDLIGRVLDPGIKGD

SEQ ID NO: 231 - protein, 1052 aa, Haemophilus parainfluenzae
MENKNLHYILGLDLGIASVGWAVVEIDEKENPLRLIDVGVRTFERAETQKGESLALSRRSARSARRLTQRRVARLKKAKRLLKSENILLSTDERLPHQVWQLRVEGLDRKLERQEWAAVLLHLIKHRGYLSQRKNESKSENKELGALLSGVASNHELLQQATYRTPAELAVKKFEVEEGHIRNQQGAYTHTFSRLDLLAEMELLFSRQQHFGNPFASEKLLENLTALLMWQKPALSGEDILKMLGKCTFEDEYKAAKNTYTAERFVWITKLNNLRIQENGLERALSDNERLMLIEQPYEKAKLTYAQVRSILNLSDDAIFKGVRYSGEDKKAIETKTTLMEMKAYHQIRKVLEGNNLKAEWVALKANPTLLDEIGTAFSLYKTDEDISAYLAGKLSQPVLNALLENLSFDKFIQLSLKALYKLLPLMQQGLRYDEACREIYGDHYGKKTEETHHFLPQIPADEIRNPVVLRTLTQARKVINGVVRLYGSPARIHIETGREVGKSYKDRHELKKRQEENRKQREKTISEIKTLFPNFSGEPKGKDILKMRLYYQQNAKCLYSGKPLELHRLFEQKYVEVDHALPLSRTWDDSFNNKVLVLANENQNKGNLTPFEWLDGKNNSERWRTFKALVETSAFPYAKKQRILSQKLDEKGFIERNLNDTRYVARFLCNFIADNMHLTGEGKRKVFASNGQITALLRRRWGLAKSREDNDRHHALDAVLVACSTVAMQQKITRFVRFKAGDVFTGERIDRETGEIIPLHFPTPWQFFKQEVEIRIFSDNPKLELENRLPDRPQANHEFVQPLFVSRMPTRKMTGQGHMETVKSAKRLNEGISMIKMPLTKLKLKDLELMVNREREKDLYDALKTRLEAFNDDPAKAFAEPFMKKGGAIVKSVRVEQVQKSGVLVRQGNGVADNASMVRVDVFTKDGKYFLVPIYTWQVAKGILPNKAVIQGKDEEDWEDIDDATFQFSLHPNDLISVKTKKDEFLGYFNGLNRHTGGINIRTHDLEKSKGKQGIFEGIGVKIALSFEKYQIDELGKNIRLCKPSKRQPVR

SEQ ID NO: 232 - protein, 1331 aa, Lactobacillus sanfranciscensis
MNKQPYNIGLDIGTSSVGWSATELDNRLLHIKGHNGIGVRLFKEGESAADRRGFRTTRRRLARRKWRLRLLNEIFATEIAKVDPSFFARLKQSNVSPKDPNKTMFENILFDDENLDDQKFHHDYKTIYHLRQAIINHPEQKFDIRLIYLAMHHIIKYRGHFLNQANVQDFKGGKIDLEKSFKALNDIFENQGRDLRLVTDKANQYVKVLSDNAKTRSDRKKELSKLLYVPIDKDTDKNSKKVTGEILKAILGNKAKFDVIFGIEVENPKEWVLTFNSDDFDDKIEGLSSQMTDEDSEILLILKELYFALNLSDILNNSVTDKNAKTLSEAMINRYDDHKNQLAMLKKVIDSSDKKHAKELKEAYSAYIDGENNKKISFEDLKKRIQKNLVDSELSQKINDLLDHDYFLPKQRSKENGAIPHQLQQQELDQIIESQKQYYPFLAELNPNEKRSRQAKYKLDELVAFRVPYYVGPMVEVTDSNQENNGKFAWMIRKEQGEITPWNFDEKVDRTETATKFITRMTTTDTYLIGEPVLPKNSLLYQKFVVLNELNNLKINQEIITPGQKQYLYEHVMKKNKRVTLKKIADALVIKGDYPYAPEVKGTTDQKNLNNGLTTYIDLAKIFGNELDDVDREADFEKIIEWSTIFEDQHIFALKLQELKWLTEKQRNQVVKLRYQGWGKLSKELLAGLVDDNGQRIIDLLWSDNQNFMQIVNQKSFKESIADHNGAHLEEKNLKDVINDLYTSPQNKKAIRQVILVVDDIINAVGYEPANIMMEFAREDSNDHRLTNSRSRQLENVYKDITNSWFDNDSVKDELEDKIKNKDKFTDRLYLYFTQGGKDLYTGEPLNIDDLSSYDIDHILPQSFILDNSLDNRVLTSQRNNRVSKEDQLPGELFGTKMHAFWKRLKAAHLISNKKYYNLTLTPNSISKFNNQGRFINRQLVETRQVIKLAAEILHNRYSEEKGTNIVTIKANLTHHMREKFNFYKNRNVNDYHHAFDAYLTAFVGNWLLQQYPKLKPYFVYGDFAKTEINNLKSFNMLYKFEQAHQLNEKDGKIAKDADALLGYMKNVYHFKKMLVTKKLETNHGALFKQTLYPSPAHDIKKRQLIKPKDNRPTDIYGGYTHEERKYMSLVKVIGKKDNEYRMANVPLLKINKNNDIKEILKSQFSNKKFEIVLPKVLKNQLFSENGALFVIGSKGYKYNANQLVLSDLDMKLLNDLSNNKSIDEVTINQLFKNIVDSTNKYMPLYEIKNLNEVVEKFNNLEFNDKKKTITDFLLATHANPTMSNLKNIGLPSYFGRFTSGNAGIKLSENANVIYQSPTGLFSRKVKISDF

SEQ ID NO: 233 - protein, 1473 aa, Flavobacterium branchiophilum
MAKILGLDLGTNSIGWAVVERENIDFSLIDKGVRIFSEGVKSEKGIESSRAAERTGYRSARKIKYRRKLRKYETLKVLSLNRMCPLSIEEVEEWKKSGFKDYPLNPEFLKWLSTDEESNVNPYFFRDRASKHKVSLFELGRAFYHIAQRRGFLSNRLDQSAEGILEEHCPKIEAIVEDLISIDEISTNITDYFFETGILDSNEKNGYAKDLDEGDKKLVSLYKSLLAILKKNESDFENCKSEIIERLNKKDVLGKVKGKIKDISQAMLDGNYKTLGQYFYSLYSKEKIRNQYTSREEHYLSEFITICKVQGIDQINEEEKINEKKFDGLAKDLYKAIFFQRPLKSQKGLIGKCSFEKSKSRCAISHPDFEEYRMWTYLNTIKIGTQSDKKLRFLTQDEKLKLVPKFYRKNDFNFDVLAKELIEKGSSFGFYKSSKKNDFFYWFNYKPTDTVAACQVAASLKNAIGEDWKTKSFKYQTINSNKEQVSRTVDYKDLWHLLTVATSDVYLYEFAIDKLGLDEKNAKAFSKTKLKKDFASLSLSAINKILPYLKEGLLYSHAVFVANIENIVDENIWKDEKQRDYIKTQISEIIENYTLEKSRFEIINGLLKEYKSENEDGKRVYYSKEAEQSFENDLKKKLVLFYKSNEIENKEQQETIFNELLPIFIQQLKDYEFIKIQRLDQKVLIFLKGKNETGQIFCTEEKGTAEEKEKKIKNRLKKLYHPSDIEKFKKKIIKDEFGNEKIVLGSPLTPSIKNPMAMRALHQLRKVLNALILEGQIDEKTIIHIEMARELNDANKRKGIQDYQNDNKKFREDAIKEIKKLYFEDCKKEVEPTEDDILRYQLWMEQNRSEIYEEGKNISICDIIGSNPAYDIEHTIPRSRSQDNSQMNKTLCSQRFNREVKKQSMPIELNNHLEILPRIAHWKEEADNLTREIEIISRSIKAAATKEIKDKKIRRRHYLTLKRDYLQGKYDRFIWEEPKVGFKNSQIPDTGIITKYAQAYLKSYFKKVESVKGGMVAEFRKIWGIQESFIDENGMKHYKVKDRSKHTHHTIDAITIACMTKEKYDVLAHAWTLEDQQNKKEARSIIEASKPWKTFKEDLLKIEEEILVSHYTPDNVKKQAKKIVRVRGKKQFVAEVERDVNGKAVPKKAASGKTIYKLDGEGKKLPRLQQGDTIRGSLHQDSIYGAIKNPLNTDEIKYVIRKDLESIKGSDVESIVDEVVKEKIKEAIANKVLLLSSNAQQKNKLVGTVWMNEEKRIAINKVRIYANSVKNPLHIKEHSLLSKSKHVHKQKVYGQNDENYAMAIYELDGKRDFELINIFNLAKLIKQGQGFYPLHKKKEIKGKIVFVPIEKRNKRDVVLKRGQQVVFYDKEVENPKDISEIVDFKGRIYIIEGLSIQRIVRPSGKVDEYGVIMLRYFKEARKADDIKQDNFKPDGVFKLGENKPTRKMNHNQFTAFVEGIDFKVLPSGKFEKI

SEQ ID NO: 234 - protein, 933 aa, Mycoplasma iowae
SVRDYSDGPGSEKSPTPYGLWRLNKEGKVEKIGENLWDVLVGKCTIYGNDDSIKDEKTKLRGGKNSPIAEVFNFINDLTNIYLFSSSKLKLNSKTKLSILDEFNISLKTSKPIKSFSEKKLVKHIISTTEFKDINFDDVYGYRIDTSKKPLFTKLENTITIAKWLLDNNVYNELNIYDQEDLIKINNIFVILQKSMDINKRAQLVSDEYKIDLPICLELVKKIKGVMQTHSFSYKAMLEYIPVGIKYNDLETGEDTSINASTYFVDKINNLNTKLLFNGRPRKYIPKNIFEDGIISPTSKRAFIQTINVLNKIIKVYSKDYDIDNIAIELPRDKNTAEERKKISSNQKKAGEEIAEVLKFAGLNVEEYTSKLNSKTKLKLKLLKEQNYKDIYDGQEIDVIDVIKNSNKYHEEHIIPYSLCFIDSRRNKVLTKFENNKQKGNKTPFQWLSSIGKYAEFKDRVEKLFVEQKISKAKKELLLFEQDPRTEMLGFIEKNLSDTRYASKLVFDTFRDFFKVNNPNVKIKVINGALTNYARYNLFATYKDGLLERKGIMKQREFYEHHGIDATILAFLGSNHKINQLLKLSHKFKKQDDNKIYDENTGELIEFTKDFLSDEARKKAMELSKQIFEIPCKFSRPIYRKSNVSFSNETLISMKWIDDKYTKGVKINKLSLVNKDLDLNEYFADYETNEMKNLICYQEDKTLYNKLKNIYDKYNNFVENSNIKPVKNPFINYMISNFSSDDSKIQNFKHIIFYDHKGNKKFVKSLKVCGDEKNLSNIVLRKDQKDIMNSKKIKKSGILESLNPISARIYKDNKGKYITIPINSLVLNWTKKGLEIDNEKLCNILKSKNIFNNQFIEINAGQSIINNENKLFYFVGGGDFKVNKLEIKSQFCDNEIFFPRKQMNISIATIIDNYKLCEVDELGKIYNIRKIVL

SEQ ID NO: 235 - protein, 1358 aa, Acidaminococcus intestini; identical to SEQ ID NO: 99

SEQ ID NO: 236 - protein, 983 aa, Campylobacter jejuni
MARILAFDIGISSIGWAFSENDELKDCGVRIFTKAENPKTGESLALPRRLARSARKRLARRKARLNHLKHLIANEFKLNYEDYQSFDESLAKAYKGSLISPYELRFRALNELLSKQDFARVILHIAKRRGYDDIKNSDDKEKGAILKAIKQNEEKLANYQSVGEYLYKEYFQKFKENSKEFTNVRNKKESYERCIAQSFLKDELKLIFKKQREFGFSFSKKFEEEVLSVAFYKRALKDFSHLVGNCSFFTDEKRAPKNSPLAFMFVALTRIINLLNNLKNTEGILYTKDDLNALLNEVLKNGTLTYKQTKKLLGLSDDYEFKGEKGTYFIEFKKYKEFIKALGEHNLSQDDLNEIAKDITLIKDEIKLKKALAKYDLNQNQIDSLSKLEFKDHLNISFKALKLVTPLMLEGKKYDEACNELNLKVAINEDKKDFLPAFNETYYKDEVTNPVVLRAIKEYRKVLNALLKKYGKVHKINIELAREVGKNHSQRAKIEKEQNENYKAKKDAELECEKLGLKINSKNILKLRLFKEQKEFCAYSGEKIKISDLQDEKMLEIDHIYPYSRSFDDSYMNKVLVFTKQNQEKLNQTPFEAFGNDSAKWQKIEVLAKNLPTKKQKRILDKNYKDKEQKNFKDRNLNDTRYIARLVLNYTKDYLDFLPLSDDENTKLNDTQKGSKVHVEAKSGMLTSALRHTWGFSAKDRNNHLHHAIDAVIIAYANNSIVKAFSDFKKEQESNSAELYAKKISELDYKNKRKFFEPFSGFRQKVLDKIDEIFVSKPERKKPSGALHEETFRKEEFYQSYGGKEGVLKALELGKIRKVNGKIVKNGDMFRVDIFKHKKTNKFYAVPIYTMDFALKVLPNKAVARSKKGEIKDWILMDENYEFCFSLYKDSLILIQTKDMQEPEFVYYNAFTSSTVSLIVSKHDNKFETLSKNQKILFKNANEKEVIAKSIGIQNLKVFEKYIVSALGEVTKAEFRQREDFKK

SEQ ID NO: 237 - protein, 1338 aa, Streptococcus macacae
MTKPYSIGLDIGTNSVGWAVVTDGYKVPAKKMKVLGNTDKSHIKKNLLGALLFDSGNTAKDRRLKRTARRRYTRRRNRILYLQEIFAEEMAKADESFFQRLNESFLTNDDKEFDSHPIFGNKAEEEAHHHKFPTIFHLRKHLADSTEKSDLRLIYLALAHMIKFRGHFLIEGQLKAENTNVQTLFDDFVEVYDKTVEESHLSEISVSSILTEKISKSRRLENLIKYYPTEKKNTLFGNLIALSLGLQPNFKTNFKLSEDAKLQFSKDTYEEDLGELLGKIGDNYADLFISAKNLYDAILLSGILTIDDNTTKAPLSASMIKRYEEHQEDLAQLKKFIRQNLPDQYSEVFSDKTKDGYAGYIDGKTNQEAFYKYIKNMLSKTEGADYFLDKIDREDFLRKQRTFDNGSVPHQIHLQEMHAILRRQGEYYPFLKENQDKIEKILTFRIPYYVGPLARKGSRFAWAEYKADKKVTPWNFDDILDKEKSAEEFITRMTLNDLYLPEEKVLPKHSLVYETFNVYNELTKVKYVNEQGKAIFFDANMKQEIFDHVFKENRKVTKDKLLNYLNKEFEEFRIVNLTGLDKENKAFNSSLGTYHDLRKILDKSFLDDKVNEKIIEDIIQTLTLFEDREMIRQRLQKYSDIFTTQQLKKLERRHYTGWGRLSAKLINGIRDKQSNKTILGYLIDDGYSNRNFMQLINDDSLPFKEEIARAQVIGETDDLNQLVSDIAGSPAIKKGILQSLKIVDELVKVMGHNPANIVIEMARENQTTAKGRRSSQQRYKRLEEAIKNLDHDLNHKILKEHPTDNQALQNDRLFLYYLQNGRDMYTEDPLDINRLSDYDIDHIIPQSFIKDDSIDNKVLVSSAKNRGKSDNVPSEDVVNRMRPFWNKLLSCGLISQRKYSNLTKKELKPDDKAGFIKRQLVETRQITKHVAQILDARFNTKRDENKKVIRDVKIITLKSNLVSQFRKDFKFYKVREINDYHHAHDAYLNAVIGKALLDVYPQLEPEFVYGEYPHFHGYKENKATAKKFFYSNIMNFFKKDDIRTDENGEIVWKKDEHISNIKRVLSYPQVNIVKKVEIQTVGQNGGLFDDNPKSPLEVTPSKLVPLKKELNPKKYGGYQKPTTAYPVLLITDTKQLIPISVMNKKQFEQNPVKFLRDRGYQQVGKNDFIKLPKYTLVDIGDGIKRLWASSKEIHKGNQLVVSKKSQILLYHAHHLDSDLSNDYLQNHNQQFDVLFNEIISFSKKCKLGKEHIQKIENVYSNKKNSASIEELAESFIKLLGFTQLGATSPFNFLGVKLNQKQYKGKKDYILPCTEGTLIRQSITGLYETRVDLSKIGED

SEQ ID NO: 238 - protein, 1265 aa, Mycoplasma ovipneumoniae
MHNKKNITIGFDLGIASIGWAIIDSTTSKILDWGTRTFEERKTANERRAFRSTRRNIRRKAYRNQRFINLILKYKDLFELKNISDIQRANKKDTENYEKIISFFTEIYKKCAAKHSNILEVKVKALDSKIEKLDLIWILHDYLENRGFFYDLEEENVADKYEGIEHPSILLYDFFKKNGFFKSNSSIPKDLGGYSFSNLQWVNEIKKLFEVQEINPEFSEKFLNLFTSVRDYAKGPGSEHSASEYGIFQKDEKGKVFKKYDNIWDKTIGKCSFFVEENRSPVNYPSYEIFNLLNQLINLSTDLKTTNKKIWQLSSNDRNELLDELLKVKEKAKIISISLKKNEIKKIILKDFGFEKSDIDDQDTIEGRKIIKEEPTTKLEVTKHLLATIYSHSSDSNWININNILEFLPYLDAICIILDREKSRGQDEVLKKLTEKNIFEVLKIDREKQLDFVKSIFSNTKFNFKKIGNFSLKAIREFLPKMFEQNKNSEYLKWKDEEIRRKWEEQKSKLGKTDKKTKYLNPRIFQDEIISPGTKNTFEQAVLVLNQIIKKYSKENIIDAIIIESPREKNDKKTIEEIKKRNKKGKGKTLEKLFQILNLENKGYKLSDLETKPAKLLDRLRFYHQQDGIDLYTLDKINIDQLINGSQKYEIEHIIPYSMSYDNSQANKILTEKAENLKKGKLIASEYIKRNGDEFYNKYYEKAKELFINKYKKNKKLDSYVDLDEDSAKNRFRFLTLQDYDEFQVEFLARNLNDTRYSTKLFYHALVEHFENNEFFTYIDENSSKHKVKISTIKGHVTKYFRAKPVQKNNGPNENLNNNKPEKIEKNRENNEHHAVDAAIVAIIGNKNPQIANLLTLADNKTDKKFLLHDENYKENIETGELVKIPKFEVDKLAKVEDLKKIIQEKYEEAKKHTAIKFSRKTRTILNGGLSDETLYGFKYDEKEDKYFKIIKKKLVTSKNEELKKYFENPFGKKADGKSEYTVLMAQSHLSEFNKLKEIFEKYNGFSNKTGNAFVEYMNDLALKEPTLKAEIESAKSVEKLLYYNFKPSDQFTYHDNINNKSFKRFYKNIRIIEYKSIPIKFKILSKHDGGKSFKDTLFSLYSLVYKVYENGKESYKSIPVTSQMRNFGIDEFDFLDENLYNKEKLDIYKSDFAKPIPVNCKPVFVLKKGSILKKKSLDIDDFKETKETEEGNYYFISTISKRFNRDTAYGLKPLKLSVVKPVAEPSTNPIFKEYIPIHLDELGNEYPVKIKEHTDDEKLMCTIK

SEQ ID NO: 239 - protein, 1535 aa, Flavobacterium columnare
MTKILGLDLGTNSIGWAIRDTENEGINQILDKGARIFSEGVKSENGKEISRAAERTAYRSARKIKYRRKLRKYETLKVLSINGMCPLSVEEVEQWKKSGFKEYPLNPEFLDWLRTNEDKNINPYLFRDKASKQKVTLFELGRALYHIAQRRGFLSNRLDQSAEGVFEEHNPQIQNLIEDLDSSNTILNELKEYYINLGIIDETEKSGFKKDLDEGEKKLKSLYNSLVAITKKNANDIETCKQELIARLNKKEDLGKVKGKIKDISQAMLDRNFKTLGQYFFSLYNKERIRNQYTSREEHYLEEFIIICQTQGIEGINTNEKLPEKKFTGLAKDLYRAIFFQRPLKSQKGLIGKCSFEKNKSRCAVSHPDYEEFRMWSYLNTIKIGTQSEKTLRFLTLEEKLKLVPKFYRKSDFNFEVLAKELVEKGASFGYYKSSKKNEFFYWFNYKPTDSVSACVVSASLENAIGKDWKIKTFEYQTRNTEKNEVTKSVDYKDLWHLLSVATSDTYLYDFAIEKLKLEPKNAKAFSKTKLKKDFASLSLAAIAKILPYLKQGLLYSHAVFMANIENIVDADIWKDEEQQKFIQSKIVELVDNYIVEKSKLELINGLLKIYNTEDKEGRKVYYSKEAESLFEADLRKKLVPFYKANIIIEEHEQEIIFQDLFPILMDQLKKQEFIKIGRLDKQIEAFLEGENEEGQIFCNHTDKLKKLYHPSDIEVFKKKTIKDEWGNEKVVLGSPLTTSIKNPMAMRALHQLRKVLNTLIANDQIDEDTRIHIEMARELNDANKRKGIQDFQNENKKFREEAIKEIKKLYLEECHKDVNPTEDDILRYQLWLEQGKCEIYEEGNNISICDIIGSNPSYDIEHTIPRSISQDNSQMNKTLCSLKFNRSIKKQKMPVELSNYNDILPRIAHWKKEAEELTRQIETISRSIKSAATKVAKDKNIRKRHYLTLKRDYILGKYERFTWEEPKVGFKNSQIPDTGIITKYAQAYLKSYFKRVESVKGGAVAEFRKLWGIQESFIDENWWKHYKDKDRDKHTHHTIDAITIACMPKDKYDLLAHAWRLEDEQDKKAAKVLIEQAKPWKTFKEDIEKIETEILVSHFTPDNVKKQSKSIIKNRGKKVYVLKNELPVNFKNKIEGKDYFKLKFDSKILYKIPKKKEKQTDTFYEELPKNYLNGVEGKDYFKINTTGKTFYKIPIFNQGDTIRGSLHQETTYGAIKLPDIDIETKKPLHTDKGGFILKKDIKGNEIVFFVVRKEISKISENDVQNIVDNVVRKKIENAIANSLITFKIVKKKKVAVIKEGVTIWMREPNIEKGIEGIPIKKVRIITNSVKNPIEIKVHSPLSKSRHKHKQKVYGQNDENYAMALYELDGKREFELINNFNLAKLLKQSQSYYPLHKEKEIKGKKILVPIEKRNNKDVILKRGQQVVFYDKTVENPKDISEIIDFRERIYIIEGLTIQRQKDKKTSKVNEYGIIQLRHFKEARKSEEISKDNFKPDGEFKINENKPTRKMNHNQFTAFVEGIDFKVLPSGKFQKI

SEQ ID NO: 240 - protein, 1459 aa, Flavobacterium columnare
MKFNLGLDIGTNSIGWALVNEDYENKKGKIIAAGSRIIPMTQDILDKFGSGAITETQTALRTDYRSKRKLIQRFLLRRERLHRVLNVLDFLPKHYAESIDFEKYFGKFLPNTEPKLAYNQNQFIFQNSFLEMLKEFQEKHPELLTNNKKIPYDWTIYYLRKKALNQRIEKEELAWLLLQFNQKRGYNQLRDEEEESVPNKQVEFYSLKIIDVVADQPKEGRDKRWYSINLENGWTYRRESKTPLFNWEGKTKDFIVTTDLNQDGSIKKDKEGKEKRSFRAPSEGDWTLLKKKTEKEIYESGKTLGTYIYDALLNTPDLKIKGDFIRTIDRSIYKEELQQIINKQKEYHLELNSSKLYKACLEELYPKNEIYKSALKNKDIAYLFINDILYYQRPLKAPKYNIGKCTYESRTFKKEDKKIREYIPAVAKSHPLFQEFRLWQWIKNLKIYEKLSSDNCTDFFLTNEQDFENLFEFLWNKKEIDHKGILEYLVKTKFPDLKPKQVKTKVKEYRWNYVYDHEKDESKTYPCGETYFLLKNKLDKIYNAQDDFLDKERLYNLWHIIYSVTDKKQYEKALAKFALKNHLDTKSFVNTFKRIPPFKNDYAIYSLKAIKKLLPLMRVGKYWNYDDIDPITKQKIQCIITGEENDTISTLVREKTNHFSNENDFKNLPLWLAGYIVYNSHNESSEIEKWKSPQDIDTFLKKFKQHALRNPIVEQVVTETLRVVRDIWSKKGQGKKDFFNEIHIELGKDLKNPVDKRRKLSSTNTKNESTNTRIKALLIELFTQGVENVKPNSPKHQEILKIFEEGALNSGIEIEEDIIKISNTDQPTKKQLELYILWLEHKYKSPYTGQSIPLSKLFTPNYEIEHIIPRSKYYDDNLSNKVICETEINRLKNNQLGYEFINNHEIREVTLEEGKTIRLLSPEQYWNFVTTYYAKNKAKRENLLLKELPVQMVEKQLNDTRYVSKYVMQLLSKIVRKEDGTDNGINSTNILSISGKMTRALKNDWDLNDVWNDLLLYRFERLNTITKTNLFTTYSEQKQKRMPIVPDQYAKGFHKKRLDHRHHALDAIVIACITRNHINYMNNQNIQGEKLKKNAIEKENYREILQKSRLDIRAQLCEKKYNDNDPTKYNWVFIKPWADFTENTKDILESIIPSFKQNLRIINKTVNYYEKYNENGKKVKVRQIKGDNWAIRKPLHKETISGKVHLSYKTPAKGKILTATRKVLDSSMDFKSIEKITDTGIQKILKNYLEYKKSPELAFSPEGIEELNATITKYNNGFHHKPIYKVRIYEEGVKFPLGNKGNKKSKYVEAEKGTNLFFAIYKDQENNRYFETIPFNDVLETLKKGMSAVPEKNQEENTLVFALSPQDLVFVPTLDEIENPDIVDFKNLTKDQTNRIYKMVSSSGKQCFFIKAEVATSIVNKMEFSTSNKMENSIEGIQIKSNCWKLKLDRLGTITRVIK

SEQ ID NO: 241 - protein, 1389 aa, Oenococcus kitaharae
MARDYSVGLDIGTSSVGWAAIDNKYHLIRAKSKNLIGVRLFDSAVTAEKRRGYRTTRRRLSRRHWRLRLLNDIFAGPLTDFGDENFLARLKYSWVHPQDQSNQAHFAAGLLFDSKEQDKDFYRKYPTIYHLRLALMNDDQKHDLREVYLAIHHLVKYRGHFLIEGDVKADSAFDVHTFADAIQRYAESNNSDENLLGKIDEKKLSAALTDKHGSKSQRAETAETAFDILDLQSKKQIQAILKSVVGNQANLMAIFGLDSSAISKDEQKNYKFSFDDADIDEKIADSEALLSDTEFEFLCDLKAAFDGLTLKMLLGDDKTVSAAMVRRFNEHQKDWEYIKSHIRNAKNAGNGLYEKSKKFDGINAAYLALQSDNEDDRKKAKKIFQDEISSADIPDDVKADFLKKIDDDQFLPIQRTKNNGTIPHQLHRNELEQIIEKQGIYYPFLKDTYQENSHELNKITALINFRVPYYVGPLVEEEQKIADDGKNIPDPTNHWMVRKSNDTITPWNLSQVVDLDKSGRRFIERLTGTDTYLIGEPTLPKNSLLYQKFDVLQELNNIRVSGRRLDIRAKQDAFEHLFKVQKTVSATNLKDFLVQAGYISEDTQIEGLADVNGKNFNNALTTYNYLVSVLGREFVENPSNEELLEEITELQTVFEDKKVLRRQLDQLDGLSDHNREKLSRKHYTGWGRISKKLLTTKIVQNADKIDNQTFDVPRMNQSIIDTLYNTKMNLMEIINNAEDDFGVRAWIDKQNTTDGDEQDVYSLIDELAGPKEIKRGIVQSFRILDDITKAVGYAPKRVYLEFARKTQESHLTNSRKNQLSTLLKNAGLSELVTQVSQYDAAALQNDRLYLYFLQQGKDMYSGEKLNLDNLSNYDIDHIIPQAYTKDNSLDNRVLVSNITNRRKSDSSNYLPALIDKMRPFWSVLSKQGLLSKHKFANLTRTRDFDDMEKERFIARSLVETRQIIKNVASLIDSHFGGETKAVAIRSSLTADMRRYVDIPKNRDINDYHHAFDALLFSTVGQYTENSGLMKKGQLSDSAGNQYNRYIKEWIHAARLNAQSQRVNPFGFVVGSMRNAAPGKLNPETGEITPEENADWSIADLDYLHKVMNFRKITVTRRLKDQKGQLYDESRYPSVLHDAKSKASINFDKHKPVDLYGGFSSAKPAYAALIKFKNKFRLVNVLRQWTYSDKNSEDYILEQIRGKYPKAEMVLSHIPYGQLVKKDGALVTISSATELHNFEQLWLPLADYKLINTLLKTKEDNLVDILHNRLDLPEMTIESAFYKAFDSILSFAFNRYALHQNALVKLQAHRDDFNALNYEDKQQTLERILDALHASPASSDLKKINLSSGFGRLFSPSHFTLADTDEFIFQSVTGLFSTQKTVAQLYQETK

SEQ ID NO: 242 - protein, 1425 aa, Prevotella micans
MIQKIFGLDLGTNSIGSSVRNLELGENLTEQLEFFSSDIFGSSVSKNSNGREYSLAGNRSAHRRSRGLNEARRRKLWATLDLLIEHGLCPMSPDSLMQWRTYDKQKGLYRQYPIEDKDFNAWIMLDFNGDGKPDYSSPYQLRRELVVRQFDFDQPIERYKLGRALYHIAQHRGFKSSKGETIADQEKNEKKPIAEEGADIANEMKASETKLSKGLVAYMQENHLKTVGEAFAKLEDERVRIRNNESYRAIRSQYQDEIKEIFTYQKKLSVESELYERLTSEKKGVGTIFYKRPLRSQRGNVGKCTLERNKPRCPIGRPEFEEFRAWTLINNIKIRETAGEPYKQLPIKLRQELLKDCFLSKVKADFKFEDIRKYIEKRLGLSFSNDDKTINYKDSVSIAACPVTVRMKKLLGENWANCRIDGEKRRQAHGKNNNNEHIVSYTEEDIWHVCYNAEDPEEVSNFARKALHWDENKIKELVRLWTSIPQGYAMLSLKAIRNINRMLLLGLKYSDAVLLAKLPDIVPVSDEDILAITKEFLQLEDKLNQEKQINNIVNSLIANYKSKLEENRFADHNYQYQLGEGDDEDINTQIKSHIGAKLWVQIGADEQTKIFQAVRSKYQDFFKSYKRKFVESPKLGELLVAFLTEKFPNVKSKQWERLYHPSQIAIYRPIPVDNDRSKLRLGNPNIGAIKNPTVMRVLNTLRRRVNQLLDDGVISPDETRVVVETARELNDANTKWALDRYNRIRRDENEKIRKILKELNPTTNSISEQDIDKARYIFEQCETDFYTDGKVPYYNKDIKKYKLWLEQGGQCLYTGQTINLTNLFNPNAFDMEHTIPKSISFDNSDQNLTLCESYYNRFIKKNNIPTDMPNYDKDVTINGKEYTAIKPRLQRWKERVDRLSRNVDFWKGQARRAQDKDRKDECIREKHLWDMELAYWKGKLERFTMTDVTDGFKNSQLVDTRVITRHAVLYLKSIFNHVEVQRGETTAEFRKILGLQSIDEKKDRSLHSHHAIDATMLTVIPSAAKRDRMLELFYKIEETKKALKNYNDNNKTGLNLELKGLEEKLDKEKKDCRVGRRVNDLDRFINENIIVSHHTKDQALTPAHRRLRKRGKIVGGKEHPRWQTGDSLRGEIHKASYYGAITQFAKDANGKVLMKDGQAQIDPTIYYVIRRELKYKRSTQDSGFTNWEDLEKVIVDTDLFGLMKGQFPEGTSFKDACEQGFYMIKKGKNGEGDVKTHRIRHVRCKAVKTALRIKEQTYKSSKDYKQFFYAAVGDLYVMCYYTDGKKRDFKIYSLYDISNHRKSGTEDIPKFITDKKGNHLPLDYKLRTGDMVLLYKDNPEELKDLDQVNLKRRLYKVNRFESEGLIILLTHHLSTTTERGCSIGKIENYQNLPTAIRCGIKTIKFLIMGKHRDFVIRNGNIEFKH

SEQ ID NO: 243 - protein, 1473 aa, Mucilaginibacter paludis
MKNILGLDLGTNSIGWALIEKDTDQKNGNILGTGSRIIPMSQDIKDEFGKGNSISQTADRTKFRSVRRLRERHLLRRERLHRVLNVLGFLPKHYADQIDFKKRLGKLVNETEPKLVYDNKNFIFKKSFEAMLSDFNQHQPLLLADGKKVPFDWTIYYLRKKALTEKIEKEELAWLILNFNQKRGYYQLRGEEEEENPNKMVAFHSLKIVEVIADESQKGKAETWYSLILENGWIYRRSSKTPLYDWKGKQRDFIVTTDLNDDGSIKTDKEGLEKRSFRAPVEDDWTLVKKKTEQEINRSHKTVGTYIYENLLQDPKQKIKGKLVRTIEREFYKDELKMILKNQQKFHPELNDEHLYINCVRELYRNNQAHQTILSKKDFVHLFIDDIIFYQRPLRSQKSSISNCTLEFRKYKNENGTDQTDYLKAIPKSHPLFQEFRLWQWIYNLGIYQKEDDTNVTDELIKNIDGYQDLFDFLNNKKEIRQDILIKFLVEQTGLKGKPLSSVVAKYRWNFVEDKIYPCNETGTQIRTRLAKVENTPEDFLTAETEIKLWHIIYSVNDKADYEKALKTFAEKHNLDTHSFVENFKKFPPFKSEYGSFSEKAIKKLLPLIRLGKYWSWENIDKKTQERIEKILTGEFDEAIKSRVRDKAIHLTEEDHFQGLQLWLASYVVYGRHSEADNLDKWHTVADLEDYLAEFRQHSLRNPIVEQVITETLRVVKDIWLQYGQGAKDFFSEIHIELAREMKNTGDERKRLTSLVTDNENTNLRIKVLLSELLNDGNVENVRPYSPMQQEALKIFEDGVLNSDIEIEDDILKISKMAQPTNTELKRYKLWLEQKYRSPYTGQIIPLNRLFTADYEIEHIIPQSRFFDDSFSNKIICESAVNQLKDKQLGLEFIKNHSGTIVKLGMGKTAKILDVESYNEFVKGNYTKNISKRNKLMLEEIPDKMIERQLNDTRYISKFIISALSNIVRSESNDDGFNSKNVLPGNGKITSRLKQDWGMNDIWNELILPRFERMNKITDSAVFTAWNENNQKFLPIVPLEFSKGFQKKRIDHRHHALDALVIAASTREHINLLNNEHAKSDKRFDLNRKLRKFEKVAYNDPKTGKRIEKEVPTIFLKPWETFTVDAKNSLESIIVSFKQNLRVINRATNYSESYNDENGALRLGKDGNPLKEKIKQSKGDSWAIRKPMHKDFVYGKVHLQNVKLPKDKFITAIRKSLDVTFDLKRIETITDTGIQKILKNYLHSKENKVELAFSPEGIEDMNQHIERYNDGKKHQPIHKVRVFEIGSRFSLGESGNKKTKFVEAAKGTNLFFAVYQDDNKGKRNYETIPLNIVIERQKLGLHSVPTEDAKGGKLLFHLSPNDMVYVPTSEELEDNLASVNIKRLNTAQRKRIYKVEKASGVECYFIRQDIAYLIKNYDAKTKIGELESQNKLQTTMTDDRLKITDVCVKLNIDRLGSIAETFLGNQYGASKKT

SEQ ID NO: 244 - protein, 1365 aa, Filifactor alocis
MTKEYYLGLDVGTNSVGWAVTDSQYNLCKFKKKDMWGIRLFESANTAKDRRLQRGNRRRLERKKQRIDLLQEIFSPEICKIDPTFFIRLNESRLHLEDKSNDFKYPLFIEKDYSDIEYYKEFPTIFHLRKHLIESEEKQDIRLIYLALHNIIKTRGHFLIDGDLQSAKQLRPILDTFLLSLQEEQNLSVSLSENQKDEYEEILKNRSIAKSEKVKKLKNLFEISDELEKEEKKAQSAVIENFCKFIVGNKGDVCKFLRVSKEELEIDSFSFSEGKYEDDIVKNLEEKVPEKVYLFEQMKAMYDWNILVDILETEEYISFAKVKQYEKHKTNLRLLRDIILKYCTKDEYNRMFNDEKEAGSYTAYVGKLKKNNKKYWIEKKRNPEEFYKSLGKLLDKIEPLKEDLEVLTMMIEECKNHTLLPIQKNKDNGVIPHQVHEVELKKILENAKKYYSFLTETDKDGYSVVQKIESIFRFRIPYYVGPLSTRHQEKGSNVWMVRKPGREDRIYPWNMEEIIDFEKSNENFITRMTNKCTYLIGEDVLPKHSLLYSKYMVLNELNNVKVRGKKLPTSLKQKVFEDLFENKSKVTGKNLLEYLQIQDKDIQIDDLSGFDKDFKTSLKSYLDFKKQIFGEEIEKESIQNMIEDIIKWITIYGNDKEMLKRVIRANYSNQLTEEQMKKITGFQYSGWGNFSKMFLKGISGSDVSTGETFDIITAMWETDNNLMQILSKKFTFMDNVEDFNSGKVGKIDKITYDSTVKEMFLSPENKRAVWQTIQVAEEIKKVMGCEPKKIFIEMARGGEKVKKRTKSRKAQLLELYAACEEDCRELIKEIEDRDERDFNSMKLFLYYTQFGKCMYSGDDIDINELIRGNSKWDRDHIYPQSKIKDDSIDNLVLVNKTYNAKKSNELLSEDIQKKMHSFWLSLLNKKLITKSKYDRLTRKGDFTDEELSGFIARQLVETRQSTKAIADIFKQIYSSEVVYVKSSLVSDFRKKPLNYLKSRRVNDYHHAKDAYLNIVVGNVYNKKFTSNPIQWMKKNRDTNYSLNKVFEHDVVINGEVIWEKCTYHEDTNTYDGGTLDRIRKIVERDNILYTEYAYCEKGELFNATIQNKNGNSTVSLKKGLDVKKYGGYFSANTSYFSLIEFEDKKGDRARHIIGVPIYIANMLEHSPSAFLEYCEQKGYQNVRILVEKIKKNSLLIINGYPLRIRGENEVDTSFKRAIQLKLDQKNYELVRNIEKFLEKYVEKKGNYPIDENRDHITHEKMNQLYEVLLSKMKKFNKKGMADPSDRIEKSKPKFIKLEDLIDKINVINKMLNLLRCDNDTKADLSLIELPKNAGSFVVKKNTIGKSKIILVNQSVTGLYENRREL

SEQ ID NO: 245 - protein, 1130 aa, Streptococcus macedonicus
MTNGKILGLDIGIASVGVGIIEAKTGKVVHANSRLFSAANAENNAERRGFRGSRRLNRRKKHRVKRVRDLFEKYGIVTDFRNLNLNPYELRVKGLTEQLTNEELFAALRTISKRRGISYLDDAEDDSTGSTDYAKSIDENRRLLKTKTPGQIQLERLEKYGQLRGNFTVYDENGEAHRLINVFSTSDYEKEARKILETQADYNKKITAEFIDDYVEILTQKRKYYHGPGNEKSRTDYGRFRTDGTTLENIFGILIGKCNFYPDEYRASKASYTAQEYNFLNDLNNLKVPTETGKLSTEQKESLVEFAKNTAILGPAKLLKEIAKILDCKVDEIKGYREDDKGKPDLHTFEPYRKLKFNLDSVNIDYLSREVLDKLADILTLNTEREGIEDAIKRNLPNQFTEEQISEIINVRKSQSTAFNKGWHSFSAKLMNELIPELYATSDEQMTILTRLEKFKVKKKSSKNIKTIDEKEITDEIYNPVVAKSVRQTIKIINAAVKKYGDFDKIVIEMPRDKNADDEKKFINKRNKENKKEKDDALKRAAYLYNGTDKLPDEVFHGNKQLETKIRLWYQQGERCLYSGKPIPIQELVHNSNNFEIDHILPLSLSFDDSLANKVLVYSWTNQEKGQKTPYQVIDSMDAAWSFREMKEYVLKQKGLGKKKRDYLLTTENIDKIEVKKKFIERNLVDTRYASRVVLNSLQSALRELGKDTKVSVVRGQFTSQLRRKWKIDKSRETYHHHAVDALIIAASSQLKLWEKQDNPMFVDYGNNQVVDKQTGEILSVSDNEYKELVFQPPYQGFVNTISSKGFEDEILFSYQVDSKYNRKVSDATIYSTRKAKIGKDKKEETYVLGKIKDIYSQNGFDTFVKKYNKDKTQFLMYQKDPLTWENVIEVILGDYPTTKKSEDGKNDVKCNPFEEYRRENGLICKYSKKGKGTPIKSLKYYDKKLGNCIDITPEESRNKVILQSINPWRADVYFNPETLKYELMGLKYSDLSFEKGTGNYHISQEKYDAIKEKEGIGKKSEFKFTLYRNDLILIKDIASGEQEIYRFLSRTMPNVNHYVELKPYDKEKFDNVQELVEALGEADKVGRCIKSLNKPNISIYKVRTDVLGNKYFVKKEGDKPKLDFKNNKK

SEQ ID NO: 246 - protein, 1367 aa, Streptococcus pyogenes
MDKKYSIGLDIGTNSVGWAVITDDYKVPSKKFKVLGNTDRHSIKKNLIGALLFGSGETAEATRLKRTARRRYTRRKNRICYLQEIFSNEMAKVDDSFFHRLEESFLVEEDKKHERHPIFGNIVDEVAYHEKYPTIYHLRKKLADSTDKADLRLIYLALAHMIKFRGHFLIEGDLNPDNSDVDKLFIQLVQIYNQLFEENPINASRVDAKAILSARLSKSRRLENLIAQLPGEKRNGLFGNLIALSLGLTPNFKSNFDLAEDAKLQLSKDTYDDDLDNLLAQIGDQYADLFLAAKNLSDAILLSDILRVNSEITKAPLSASMIKRYDEHHQDLTLLKALVRQQLPEKYKEIFFDQSKNGYAGYIDGGASQEEFYKFIKPILEKMDGTEELLVKLNREDLLRKQRTFDNGSIPHQIHLGELHAILRRQEDFYPFLKDNREKIEKILTFRIPYYVGPLARGNSRFAWMTRKSEETITPWNFEEVVDKGASAQSFIERMTNFDKNLPNEKVLPKHSLLYEYFTVYNELTKVKYVTEGMRKPAFLSGEQKKAIVDLLFKTNRKVTVKQLKEDYFKKIECFDSVEISGVEDRFNASLGAYHDLLKIIKDKDFLDNEENEDILEDIVLTLTLFEDRGMIEERLKTYAHLFDDKVMKQLKRRRYTGWGRLSRKLINGIRDKQSGKTILDFLKSDGFANRNFMQLIHDDSLTFKEDIQKAQVSGQGHSLHEQIANLAGSPAIKKGILQTVKIVDELVKVMGHKPENIVIEMARENQTTQKGQKNSRERMKRIEEGIKELGSQILKEHPVENTQLQNEKLYLYYLQNGRDMYVDQELDINRLSDYDVDHIVPQSFIKDDSIDNKVLTRSDKNRGKSDNVPSEEVVKKMKNYWRQLLNAKLITQRKFDNLTKAERGGLSELDKAGFIKRQLVETRQITKHVAQILDSRMNTKYDENDKLIREVKVITLKSKLVSDFRKDFQFYKVREINNYHHAHDAYLNAVVGTALIKKYPKLESEFVYGDYKVYDVRKMIAKSEQEIGKATAKYFFYSNIMNFFKTEITLANGEIRKRPLIETNGETGEIVWDKGRDFATVRKVLSMPQVNIVKKTEVQTGGFSKESILPKRNSDKLIARKKDWDPKKYGGFDSPTVAYSVLVVAKVEKGKSKKLKSVKELLGITIMERSSFEKNPIDFLEAKGYKEVKKDLIIKLPKYSLFELENGRKRMLASAGELQKGNELALPSKYVNFLYLASHYEKLKGSPEDNEQKQLFVEQHKHYLDEIIEQISEFSKRVILADANLDKVLSAYNKHRDKPIREQAENIIHLFTLTNLGAPAAFKYFDTTIDRKRYTSTKEVLDATLIHQSITGLYETRIDLSQLGGD

SEQ ID NO: 247 - protein, 1233 aa, Mycoplasma canis
MEKKRKVTLGFDLGIASVGWAIVDSETNQVYKLGSRLFDAPDTNLERRTQRGTRRLLRRRKYRNQKFYNLVKRTEVFGLSSREAIENRFRELSIKYPNIIELKTKALSQEVCPDEIAWILHDYLKNRGYFYDEKETKEDFDQQTVESMPSYKLNEFYKKYGYFKGALSQPTESEMKDNKDLKEAFFFDFSNKEWLKEINYFFNVQKNILSETFIEEFKKIFSFTRDISKGPGSDNMPSPYGIFGEFGDNGQGGRYEHIWDKNIGKCSIFTNEQRAPKYLPSALIFNFLNELANIRLYSTDKKNIQPLWKLSSVDKLNILLNLFNLPISEKKKKLTSTNINDIVKKESIKSIMISVEDIDMIKDEWAGKEPNVYGVGLSGLNIEESAKENKFKFQDLKILNVLINLLDNVGIKFEFKDRNDIIKNLELLDNLYLFLIYQKESNNKDSSIDLFIAKNESLNIENLKLKLKEFLLGAGNEFENHNSKTHSLSKKAIDEILPKLLDNNEGWNLEAIKNYDEEIKSQIEDNSSLMAKQDKKYLNDNFLKDAILPPNVKVTFQQAILIFNKIIQKFSKDFEIDKVVIELAREMTQDQENDALKGIAKAQKSKKSLVEERLEANNIDKSVFNDKYEKLIYKIFLWISQDFKDPYTGAQISVNEIVNNKVEIDHIIPYSLCFDDSSANKVLVHKQSNQEKSNSLPYEYIKQGHSGWNWDEFTKYVKRVFVNNVDSILSKKERLKKSENLLTASYDGYDKLGFLARNLNDTRYATILFRDQLNNYAEHHLIDNKKMFKVIAMNGAVTSFIRKNMSYDNKLRLKDRSDFSHHAYDAAIIALFSNKTKTLYNLIDPSLNGIISKRSEGYWVIEDRYTGEIKELKKEDWTSIKNNVQARKIAKEIEEYLIDLDDEVFFSRKTKRKTNRQLYNETIYGIATKTDEDGITNYYKKEKFSILDDKDIYLRLLREREKFVINQSNPEVIDQIIEIIESYGKENNIPSRDEAINIKYTKNKINYNLYLKQYMRSLTKSLDQFSEEFINQMIANKTFVLYNPTKNTTRKIKFLRLVNDVKINDIRKNQVINKFNGKNNEPKAFYENINSLGAIVFKNSANNFKTLSINTQIAIFGDKNWDIEDFKTYNMEKIEKYKEIYGIDKTYNFHSFIFPGTILLDKQNKEFYYISSIQTVRDIIEIKFLNKIEFKDENKNQDTSKTPKRLMFGIKSIMNNYEQVDISPFGINKKIFE

SEQ ID NO: 248 - protein, 1375 aa, Lactobacillus johnsonii
MTKIKDDYIVGLDIGTDSCGWVAMNSNNDILKLQGKTAIGSRLFEGGKSAAERRLFRTTHRRIKRRRWRLKLLEEFFDPYMAEVDPYFFARLKESGLSPLDKRKTVSSIVFPTSAEDKKFYDDYPTIYHLRYKLMTEDEKFDLREVYLAIHHIIKYRGNFLYNTSVKDFKASKIDVKSSIEKLNELYENLGLDLNVEFNISNTAEIEKVLKDKQIFKRDKVKKIAELFAIKTDNKEQSKRIKDISKQVANAVLGYKTRFDTIALKEISKDELSDWNFKLSDIDADSKFEALMGNLDENEQAILLTIKELFNEVTLNGIVEDGNTLSESMINKYNDHRDDLKLLKEVIENHIDRKKAKELALAYDLYVNNRHGQLLQAKKKLGKIKPRSKEDFYKVVNKNLDDSRASKEIKKKIELDSFMPKQRTNANGVIPYQLQQLELDKIIENQSKYYPFLKEINPVSSHLKEAPYKLDELIRFRVPYYVGPLISPNESTKDIQTKKNQNFAWMIRKEEGRITPWNFDQKVDRIESANKFIKRMTTKDTYLFGEDVLPANSLLYQKFTVLNELNNIRINGKRISVDLKQEIYENLFKKHTTVTVKKLENYLKENHNLVKVEIKGLADEKKFNSGLTTYNRFKNLNIFDNQIDDLKYRNDFEKIIEWSTIFEDKSIYKEKLRSIDWLNEKQINALSNIRLQGWGRLSKKLLAQLHDHNGQTIIEQLWDSQNNFMQIVTQADFKDAIAKANQNLLVATSVEDILNNAYTSPANKKAIRQVIKVVDDIVKAASGKVPKQIAIEFTRDADENPKRSQTRGSKLQKVYKDLSTELASKTIAEELNEAIKDKKLVQDKYYLYFMQLGRDAYTGEPINIDEIQKYDIDHILPQSFIKDDALDNRVLVSRAVNNGKSDNVPVKLFGNEMAANLGMTIRKMWEEWKNIGLISKTKYNNLLTDPDHINKYKSAGFIRRQLVETSQIIKLVSTILQSRYPNTEIITVKAKYNHYLREKFDLYKSREVNDYHHAIDAYLSAICGNLLYQNYPNLRPFFVYGQYKKFSSDPDKEKAIFNKTRKFSFISQLLKNKSENSKEIAKKLKRAYQFKYMLVSRETETRDQEMFKMTVYPRFSHDTVKAPRNLIPKKMGMSPDIYGGYTNNSDAYMVIVRIDKKKGTEYKILGIPTRELVNLKKAEKEDHYKSYLKEILTPRILYNKNGKRDKKITSFEIVKSKIPYKQVIQDGDKKFMLGSSTYVYNAKQLTLSTESMKAITNNFDKDSDENDALIKAYDEILDKVDKYLPLFDINKFREKLHSGREKFIKLSLEDKKDTILKVLEGLHDNAVMTKIPTIGLSTPLGFMQFPNGVILSENAKLIYQSPTGLFKKSVKISDL

SEQ ID NO: 249 - protein, 1053 aa, Staphylococcus aureus
MKRNYILGLDIGITSVGYGIIDYETRDVIDAGVRLFKEANVENNEGRRSKRGARRLKRRRRHRIQRVKKLLFDYNLLTDHSELSGINPYEARVKGLSQKLSEEEFSAALLHLAKRRGVHNVNEVEEDTGNELSTKEQISRNSKALEEKYVAELQLERLKKDGEVRGSINRFKTSDYVKEAKQLLKVQKAYHQLDQSFIDTYIDLLETRRTYYEGPGEGSPFGWKDIKEWYEMLMGHCTYFPEELRSVKYAYNADLYNALNDLNNLVITRDENEKLEYYEKFQIIENVFKQKKKPTLKQIAKEILVNEEDIKGYRVTSTGKPEFTNLKVYHDIKDITARKEIIENAELLDQIAKILTIYQSSEDIQEELTNLNSELTQEEIEQISNLKGYTGTHNLSLKAINLILDELWHTNDNQIAIFNRLKLVPKKVDLSQQKEIPTTLVDDFILSPVVKRSFIQSIKVINAIIKKYGLPNDIIIELAREKNSKDAQKMINEMQKRNRQTNERIEEIIRTTGKENAKYLIEKIKLHDMQEGKCLYSLEAIPLEDLLNNPFNYEVDHIIPRSVSFDNSFNNKVLVKQEENSKKGNRTPFQYLSSSDSKISYETFKKHILNLAKGKGRISKTKKEYLLEERDINRFSVQKDFINRNLVDTRYATRGLMNLLRSYFRVNNLDVKVKSINGGFTSFLRRKWKFKKERNKGYKHHAEDALIIANADFIFKEWKKLDKAKKVMENQMFEEKQAESMPEIETEQEYKEIFITPHQIKHIKDFKDYKYSHRVDKKPNRELINDTLYSTRKDDKGNTLIVNNLNGLYDKDNDKLKKLINKSPEKLLMYHHDPQTYQKLKLIMEQYGDEKNPLYKYYEETGNYLTKYSKKDNGPVIKKIKYYGNKLNAHLDITDDYPNSRNKVVKLSLKPYRFDVYLDNGVYKFVTVKNLDVIKKENYYEVNSKCYEEAKKLKKISNQAEFIASFYNNDLIKINGELYRVIGVNNDLLNRIEVNMIDITYREYLENMNDKRPPRIIKTIASKTQSIKKYSTDILGNLYEVKSKKHPQIIKKG

SEQ ID NO: 250 - protein, 1063 aa, Simonsiella muelleri
MEKFHYVLGLDLGIASVGWAAIEIDKETETSIGLLDCGVRTFERAEVPKTGDSLAKARREARSTRRLIRRRSHRLLRLKRLLKREIFRQPETFKDLPINAWQLRVKGLDSRLNEYEWAAVLLHLVKHRGYLSQRKSEMSETDSKSEMGRLLAGVAENHQLLQQEQYRTPAELALKKFVKHFRNKGGDYAHTFNRLDLQAELHLLFQKQRELGNPFTSPELERQVDDLLMTQRSALQGDAILKMLGHCGFEPEQFKAAKNTFSAERFIWLTKLNNLRIQDQGKERALTADERTKLLDEPYKKSKLTYAQVRKLLSLPQTAIFKGLRYDLEHDKKAENSTLMEMKSYHNIRQTLEKSGLKTEWQSIATQPEILDAIGTAFSIYKTDEDISHELKTCRLPENVLNELLKNINFDGFIQLSLTALRKILPLMEQGYRYDEACTQIYGNHHSGSLQQESKQFLPHIPIDDVRNPVVFRTLTQARKVVNAIIRRYGSPARVHIEMARELGKSKSDRDRIEKQQQKNKKERENAVAKFKEDFPDFVGEPRGKDILKMRLYEQQHGKCLYSGHDIDINRLNEKGYVEIDHALPFSRTWDDSQNNKVLVLGSENQNKRNQTPDEYLDGANNSQRWLEFQARVQTCHFSYGKKQRIQLAKLDDETEKGFLERNLNDTRYIARFMCQFVQENLYLTGKGKRLVFASNGGMTATLRNLWGLRKVREDNDRHHALDAIVVACSTASMQQKITKAFQRHESIEYVDTETGEVKFRIPQPWDFFRQEVMIRVFSDQPCEDLVEKLSARPEALHDNVTPLFVSRAPNRKMSGQGHLETIKSAKRLSEENSMVKKPLTTLKLKDIPEIVGYPSREPQLYAALKTRLETHDDDPIKAFAKPFYKPNKNGELGALVRSVRVKGVQNTGVMVHDGKGIADNATMVRVDVYTKAGKNYLVPVYVWQVAQGILPNRAVTSGKSEADWDLIDESFEFKFSLSRGDLVEMISNKGRIFGYYNGLDRANGSIGIREHDLEKSKGKDGVHRVGVKTATAFNKYHVDPLGKEIHRCSSEPRPTLKIKSKK

SEQ ID NO: 251 - protein, 1509 aa, Psychroflexus torquis
MKRILGLDLGTNSIGWSLIEHDFKNKQGQIEGLGVRIIPMSQEILGKFDAGQSISQTADRTKYRGVRRLYQRDNLRRERLHRVLKILDFLPKHYSESIDFQDKVGQFKPKQEVKLNYRKNEKNKHEFVFMNSFIEMVSEFKNAQPELFYNKGNGEETKIPYDWTLYYLRKKALTQQITKEELAWLILNFNQKRGYYQLRGEDIDEDKNKKYMQLKVNNLIDSGAKVKGKVLYNVIFDNGWKYEKQIVNKDEWEGRTKEFIITTKTLKNGNIKRTYKAVDSEIDWAAIKAKTEQDINKANKTVGEYIYESLLDNPSQKIRGKLVKTIERKFYKEEFEKLLSKQIELQPELFNESLYKACIKELYPRNENHQSNNKKQGFEYLFTEDIIFYQRPLKSQKSNISGCQFEHKIYKQKNKKTGKLELIKEPIKTISRSHPLFQEFRIWQWLQNLKIYNKEKIENGKLEDVTTQLLPNNEAYVTLFDFLNTKKELEQKQFIEYFVKKKLIDKKEKEHFRWNFVEDKKYPFSETRAQFLSRLAKVKGIKNTEDFLNKNTQVGSKENSPFIKRIEQLWHIIYSVSDLKEYEKALEKFAEKHNLEKDSFLKNFKKFPPFVSDYASYSKKAISKLLPIMRMGKYWSESAVPTQVKERSLSIMERVKVLPLKEGYSDKDLADLLSRVSDDDIPKQLIKSFISFKDKNPLKGLNTYQANYLVYGRHSETGDIQHWKTPEDIDRYLNNFKQHSLRNPIVEQVVMETLRVVRDIWEHYGNNEKDFFKEIHVELGREMKSPAGKREKLSQRNTENENTNHRIREVLKELMNDASVEGGVRDYSPSQQEILKLYEEGIYQNPNTNYLKVDEDEILKIRKKNNPTQKEIQRYKLWLEQGYISPYTGKIIPLTKLFTHEYQIEHIIPQSRYYDNSLGNKIICESEVNEDKDNKTAYEYLKVEKGSIVFGHKLLNLDEYEAHVNKYFKKNKTKLKNLLSEDIPEGFINRQLNDSRYISKLVKGLLSNIVRENGEQEATSKNLIPVTGVVTSKLKQDWGLNDKWNEIIAPRFKRLNKLTNSNDFGFWDNDINAFRIQVPDSLIKGFSKKRIDHRHHALDALVVACTSRNHTHYLSALNAENKNYSLRDKLVIKNENGDYTKTFQIPWQGFTIEAKNNLEKTVVSFKKNLRVINKTNNKFWSYKDENGNLNLGKDGKPKKKLRKQTKGYNWAIRKPLHKETVSGIYNINAPKNKIATSVRTLLTEIKNEKHLAKITDLRIRETILPNHLKHYLNNKGEANFSEAFSQGGIEDLNKKITTLNEGKKHQPIYRVKIFEVGSKFSISEDENSAKSKKYVEAAKGTNLFFAIYLDEENKKRNYETIPLNEVITHQKQVAGFPKSERLSVQPDSQKGTFLFTLSPNDLVYVPNNEELENRDLFNLGNLNVEQISRIYKFTDSSDKTCNFIPFQVSKLIFNLKKKEQKKLDVDFIIQNEFGLGSPQSKNQKSIDDVMIKEKCIKLKIDRLGNISKA

SEQ ID NO: 252 - protein, 1112 aa, Staphylococcus simulans
MLVGLKFKQSILFENMENAEDIKESATGSDAISLSDDYYENLSEFLTDEQLNFIESANTFFMGIMLDRILKGATSISAAKVRDYKIFKSQLKLIKDIVYQNKYDKYHEFFVTSKEDMRAYQENPDAKNFGKLSKFDQYLIHSKDQYAKLMKDLKGLVPKEYTEVLNLIDEQKFLVVQNTTDNASIPYQNNVFEAENILRNQQKYYPEITEEMIGKVINLISFRIPYYVGPLTNKNGQSDFAWMIRKSDEQTLPWNFDKVIDKSKSAEKFIRRMTSKCTYLLEEDVLPKHSLLYQEMEVLNELNNVQLRGENEPKHRIHRLDPKVKQFIYHNLFQKKKNVTHKDLITLLQNSEHRNTLNKTSGQKLKVFGTQNDSKFASKLSTYNDMKAILGSVENKRQMIEELVLWITIFEDKAILKQKIGEKYPNITEKQLNQIVKLNYSGWGRLSEKLLTKEVNGRSLIDLMYSTENNFMEIITDKTLGFDCFIKNSNKVKNAKISYKDVAELRTSPALKKGIWNAIKMVREISNLFGAPEKIIIEFATEDQAKGKRQKSRSELWDDLVKKNNLKRNKEFEGLFEELKAYPDLDFSNPKLWLYIHQNGKCMYTKKPIDLERLMSDTNNQLYEIDHILPRTFVKDDSINNKVLVIQSANQKKSGDKMPLEIFDNHVLVPFWKMLYENDLISSSKLSKLMKKEFNDLDKEGFIQRQLVETRQIISHVSDFLTEEYPSTTVVPMKANVVSELRRKFDIPKIRQLNDWHHAVDAYLNGFVYQAARVFYPKVNLFEFNFKWEKVREKWRQLGEFTENNKKREFFLFKRMENYVNEYGEGMISKLIFDLDNFKFNYSRKVESTESAFYKQSAFSPKNTTAQYDSDKNKTAIYKEMKNKRGIVVSYTYVKKDQELIGYGVFNETVFEYVNNADVDMNTRALKIVRKAFPKLDIKKAQYLFSINKGDALLVNGHPFLFVSAYERINGKQLEFDIAMQRKIKQALSPYNNMTEQEKVEFYNQFAEKVIEEFRNSIGLQSRDRKVNLIKNLFNNTEKSNDSMTQSILEVLKMTKVSAERSKELKIRWNGQTPNTFIDTKNNAEIQYKSITGLKTTKPKSIFKLAESKNEL

SEQ ID NO: 253 - protein, 1274 aa, Mycoplasma gallisept
MNINMNNSIKSKPEVTIGLDLGVGSVGWAIVDNETNIIHHLGSRLFSQAKTAEDRRSFRGVRRLIRRRKYKLKRFVNLIWKYNSYFGFKNKEDILNNYQEQQKLHNTVLNLKLEALNAKIDPKALSWILHDYLKNRGHFYEDNRDFNVYPTEELANYFDEFGYYKGIIDSKNDDDDKLEEGLTKYKFSNQHWLEEVKKVLSNQTGLPEKFKEEYESLFSYVRNYSEGPGSINSVSPYGIYHLDEKEGKVVQKYNNIWDKTIGKCSIFPDEYRAPKNSPIAMIFNEINELSTIRSYSIYLTGWFINQEFKKAYLNKLLDLLIKTNSEKPIDARQFKKLREETIAESIGKETLKDVESEEKLEKDDHKWKLKGLKLNTNGKIQYNDLSSLAKFVHKLKQHLKLDFLLEDQYTPLDKINFLQSLYVYLGKHLRYSNRVDSANLKEFSDSSRLFERVLQEQKDGLFKLFEQTDKDDEKILTQTHSLSTKAMLLAITRMTNLDNDEDNQKNNDKGWNFEAIKNFDQKFIDITKTNNNLSLKQDKRYLDDQFINDAILSPGVKRILREATKVFNAILKQFSEEYDVTKVVIELARELSEEKELENTKNYKKLIKKNGDKISEGLKALGIAEDKIEEILKSPTKSYKVLLWLQQDHIDPYSQKEIAFDDILTKTEKTEIDHIIPYSISFDDSSSNKLLVLAESNQAKSNQTPYEFINSGKAEITWEVYEAYCHKFKNGDSSLLDSTQRSKKFAKMMKTDTSSKYDIGFLARNLNDTRYATIVFRDALKDYANNHLVEDKPMFKVVCINGGVTSFLRKNFDPKSWYAKKDRDKNIHHAVDASIISIFSNETKTLFNQLTKFADYKLFKNTDGSWKKIDPKTGVVSEVTDENWKQIRVRNQVSEIAKVIDKYIQDSNIERKARYSRKIENKTNISLFNDTVYSAKKVGYEDQIKRKNLKTLDIHESAEENKNSKVKKQFVYRKLVNVSLLNNDKLADLFAEKEDILMYRANPWVINLAEQIFNEYTENKKIKSQNVFEKYMLDLTKEFPEKFSEAFVKSMIRNKTAIIYNVEKDVVHRIKRLKILSSELKENKWSNVIIRSKNESGTKLSYQDTINSIALMIMRSIDPTAKKQYIRVPLNTLNLHLGDQDFDLHNIDAYLKKPKFVKYLKANEIGDEYKPWRVLTSGTLLIHKKDKKLMYISSFQNLNDLIEIKNLIETEYKENVDSDPKKKKKASQILRSLSVILNDYILLDAKYNFDILGLSKNKIDEILNSKLDLDKIAK

SEQ ID NO: 254 - protein, 1122 aa, Artificial Sequence; identical to SEQ ID NO: 23
  Synthetic Sequence

SEQ ID NO: 255 - protein, 1236 aa, Artificial Sequence; identical to SEQ ID NO: 21
  Synthetic Sequence

SEQ ID NO: 256 - protein, 1059 aa, Artificial Sequence; identical to SEQ ID NO: 15
  Synthetic Sequence

SEQ ID NO: 257 - protein, 1166 aa, Artificial Sequence; identical to SEQ ID NO: 39
  Synthetic Sequence

SEQ ID NO: 258 - protein, 1149 aa, Artificial Sequence; identical to SEQ ID NO: 37
  Synthetic Sequence

SEQ ID NO: 259 - protein, 1314 aa, Artificial Sequence; identical to SEQ ID NO: 27
  Synthetic Sequence

SEQ ID NO: 260 - protein, 1064 aa, Artificial Sequence; identical to SEQ ID NO: 38
  Synthetic Sequence

SEQ ID NO: 261 - protein, 1401 aa, Artificial Sequence
  Synthetic Sequence
MDKKYSIGLDIGTNSVGWAVITDEYKVPSKKFKVLGNTDRHSIKKNLIGALLFDSGETAEATRLKRTARRRYTRRKNRICYLQEIFSNEMAKVDDSFFHRLEESFLVEEDKKHERHPIFGNIVDEVAYHEKYPTIYHLRKKLVDSTDKADLRLIYLALAHMIKFRGHFLIEGDLNPDNSDVDKLFIQLVQTYNQLFEENPINASGVDAKAILSARLSKSRRLENLIAQLPGEKKNGLFGNLIALSLGLTPNFKSNFDLAEDAKLQLSKDTYDDDLDNLLAQIGDQYADLFLAAKNLSDAILLSDILRVNTEITKAPLSASMIKRYDEHHQDLTLLKALVRQQLPEKYKEIFFDQSKNGYAGYIDGGASQEEFYKFIKPILEKMDGTEELLVKLNREDLLRKQRTFDNGSIPHQIHLGELHAILRRQEDFYPFLKDNREKIEKILTFRIPYYVGPLARGNSRFAWMTRKSEETITPWNFEEVVDKGASAQSFIERMTNFDKNLPNEKVLPKHSLLYEYFTVYNELTKVKYVTEGMRKPAFLSGEQKKAIVDLLFKTNRKVTVKQLKEDYFKKIECFDSVEISGVEDRFNASLGTYHDLLKIIKDKDFLDNEENEDILEDIVLTLTLFEDREMIEERLKTYAHLFDDKVMKQLKRRRYTGWGRLSRKLINGIRDKQSGKTILDFLKSDGFANRNFMQLIHDDSLTFKEDIQKAQVSGQGDSLHEHIANLAGSPAIKKGILQTVKVVDELVKVMGRHKPENIVIEMARENQTTQKGQKNSRERMKRIEEGIKELGSQILKEHPVENTQLQNEKLYLYYLQNGRDMYVDQELDINRLSDYDVDHIVPQSFLKDDSIDNKVLTRSDKNRGKSDNVPSEEVVKKMKNYWRQLLNAKLITQRKFDNLTKAERGGLSELDKAGFIKRQLVETRQITKHVAQILDSRMNTKYDENDKLIREVKVITLKSKLVSDFRKDFQFYKVREINNYHHAHDAYLNAVVGTALIKKYPKLESEFVYGDYKVYDVRKMIAKSEQEIGKATAKYFFYSNIMNFFKTEITLANGEIRKRPLIETNGETGEIVWDKGRDFATVRKVLSMPQVNIVKKTEVQTGGFSKESILPKRNSDKLIARKKDWDPKKYGGFDSPTVAYSVLVVAKVEKGKSKKLKSVKELLGITIMERSSFEKNPIDFLEAKGYKEVKKDLIIKLPKYSLFELENGRKRMLASAGELQKGNELALPSKYVNFLYLASHYEKLKGSPEDNEQKQLFVEQHKHYLDEIIEQISEFSKRVILADANLDKVLSAYNKHRDKPIREQAENIIHLFTLTNLGAPAAFKYFDTTIDRKRYTSTKEVLDATLIHQSITGLYETRIDLSQLGGDAYPYDVPDYASLGSGSPKKKRKVEDPKKKRKVD

SEQ ID NO: 262 - protein, 1368 aa, Artificial Sequence
  Synthetic Sequence
MDKKYSIGLAIGTNSVGWAVITDDYKVPSKKLKGLGNTDRHGIKKNLIGALLFDSGETAEATRLKRTARRRYTRRKNRICYLQEIFSNEMAKVDDSFFHRLEESFLVEEDKKHERHPIFGNIVDEVAYHEKYPTIYHLRKKLADSTDKVDLRLIYLALAHMIKFRGHFLIEGDLNPDNSDVDKLFIQLVQTYNQLFEENPINASRVDAKAILSARLSKSRRLENLIAQLPGEKKNGLFGNLIALSLGLTPNFKSNFDLAEDAKLQLSKDTYDDDLDNLLAQIGDQYADLFLAAKNLSDATLLSDILRVNSEITKAPLSASMIKRYDEHHQDLTLLKALVRQQLPEKYKEIFFDQSKNGYAGYIDGGASQEEFYKFIKPILEKMDGTEELLAKLNREDLLRKQRTFDNGSIPYQIHLGELHAILRRQEDFYPFLKDNREKIEKILTFRIPYYVGPLARGNSRFAWMTRKSEETITPWNFEEVVDKGASAQSFIERMTNFDKNLPNEKVLPKHSLLYEYFTVYNELTKVKYVTEGMRKPAFLSGEQKKAIVDLLFKTNRKVTVKQLKEDYFKKIECFDSVEISGVEDRFNASLGTYHDLLKIIKDKDFLDNEENEDILEDIVLTLTLFEDREMIEERLKTYAHLFDDKVMKQLKRRRYTGWGRLSRKLINGIRDKQSGKTILDFLKSDGFANRNFMQLIHDDSLTFKEDIQKAQVSGQGDSLHEHIANLAGSPAIKKGILQTVKVVDELVKVMGRHKPENIVIEMARENQTTQKGQKNSRERMKRIEEGIKELGSDILKEYPVENTQLQNEKLYLYYLQNGRDMYVDQELDINRLSDYDVDHIVPQSFLKDDSIDNKVLTRSDKNRGKSDNVPSEEVVKKMKNYWRQLLNAKLITQRKFDNLTKAERGGLSELDKVGFIKRQLVETRQITKHVAQILDSRMNTKYDENDKLIREVRVITLKSKLVSDFRKDFQFYKVREINNYHHAHDAYLNAVVGTALIKKYPKLESEFVYGDYKVYDVRKMIAKSEQEIGKATAKYFFYSNIMNFFKTEITLANGEIRKRPLIETNGETGEIVWDKGRDFATVRKVLSMPQVNIVKKTEVQTGGFSKESILPKRNSDKLIARKKDWDPKKYGGFDSPTVAYSVLVVAKVEKGKSKKLKSVKELLGITIMERSSFEKDPIDFLEAKGYKEVRKDLIIKLPKYSLFELENGRKRMLASAGELQKGNELALPSKYVNFLYLASHYEKLKGSPEDNEQKQLFVEQHKHYLDEIIEQISEFSKRVILADANLDKVLSAYNKHRDKPIREQAENIIHLFTLTNLGAPAAFKYFDTTIDRKRYTSTKEVLDATLIHQSITGLYETRIDLSQLGGD

SEQ ID NO: 263 - protein, 1368 aa, Artificial Sequence
  Synthetic Sequence
MDKKYSIGLDIGTNSVGWAVITDDYKVPSKKLKGLGNTDRHGIKKNLIGALLFDSGETAEATRLKRTARRRYTRRKNRICYLQEIFSNEMAKVDDSFFHRLEESFLVEEDKKHERHPIFGNIVDEVAYHEKYPTIYHLRKKLADSTDKVDLRLIYLALAHMIKFRGHFLIEGDLNPDNSDVDKLFIQLVQTYNQLFEENPINASRVDAKAILSARLSKSRRLENLIAQLPGEKKNGLFGNLIALSLGLTPNFKSNFDLAEDAKLQLSKDTYDDDLDNLLAQIGDQYADLFLAAKNLSDATLLSDILRVNSEITKAPLSASMIKRYDEHHQDLTLLKALVRQQLPEKYKEIFFDQSKNGYAGYIDGGASQEEFYKFIKPILEKMDGTEELLAKLNREDLLRKQRTFDNGSIPYQIHLGELHAILRRQEDFYPFLKDNREKIEKILTFRIPYYVGPLARGNSRFAWMTRKSEETITPWNFEEVVDKGASAQSFIERMTNFDKNLPNEKVLPKHSLLYEYFTVYNELTKVKYVTEGMRKPAFLSGEQKKAIVDLLFKTNRKVTVKQLKEDYFKKIECFDSVEISGVEDRFNASLGTYHDLLKIIKDKDFLDNEENEDILEDIVLTLTLFEDREMIEERLKTYAHLFDDKVMKQLKRRRYTGWGRLSRKLINGIRDKQSGKTILDFLKSDGFANRNFMQLIHDDSLTFKEDIQKAQVSGQGDSLHEHIANLAGSPAIKKGILQTVKVVDELVKVMGRHKPENIVIEMARENQTTQKGQKNSRERMKRIEEGIKELGSDILKEYPVENTQLQNEKLYLYYLQNGRDMYVDQELDINRLSDYDVDAIVPQSFLKDDSIDNKVLTRSDKNRGKSDNVPSEEVVKKMKNYWRQLLNAKLITQRKFDNLTKAERGGLSELDKVGFIKRQLVETRQITKHVAQILDSRMNTKYDENDKLIREVRVITLKSKLVSDFRKDFQFYKVREINNYHHAHDAYLNAVVGTALIKKYPKLESEFVYGDYKVYDVRKMIAKSEQEIGKATAKYFFYSNIMNFFKTEITLANGEIRKRPLIETNGETGEIVWDKGRDFATVRKVLSMPQVNIVKKTEVQTGGFSKESILPKRNSDKLIARKKDWDPKKYGGFDSPTVAYSVLVVAKVEKGKSKKLKSVKELLGITIMERSSFEKDPIDFLEAKGYKEVRKDLIIKLPKYSLFELENGRKRMLASAGELQKGNELALPSKYVNFLYLASHYEKLKGSPEDNEQKQLFVEQHKHYLDEIIEQISEFSKRVILADANLDKVLSAYNKHRDKPIREQAENIIHLFTLTNLGAPAAFKYFDTTIDRKRYTSTKEVLDATLIHQSITGLYETRIDLSQLGGD

SEQ ID NO: 264 - protein, 1368 aa, Artificial Sequence
  Synthetic Sequence
MDKKYSIGLAIGTNSVGWAVITDDYKVPSKKLKGLGNTDRHGIKKNLIGALLFDSGETAEATRLKRTARRRYTRRKNRICYLQEIFSNEMAKVDDSFFHRLEESFLVEEDKKHERHPIFGNIVDEVAYHEKYPTIYHLRKKLADSTDKVDLRLIYLALAHMIKFRGHFLIEGDLNPDNSDVDKLFIQLVQTYNQLFEENPINASRVDAKAILSARLSKSRRLENLIAQLPGEKKNGLFGNLIALSLGLTPNFKSNFDLAEDAKLQLSKDTYDDDLDNLLAQIGDQYADLFLAAKNLSDATLLSDILRVNSEITKAPLSASMIKRYDEHHQDLTLLKALVRQQLPEKYKEIFFDQSKNGYAGYIDGGASQEEFYKFIKPILEKMDGTEELLAKLNREDLLRKQRTFDNGSIPYQIHLGELHAILRRQEDFYPFLKDNREKIEKILTFRIPYYVGPLARGNSRFAWMTRKSEETITPWNFEEVVDKGASAQSFIERMTNFDKNLPNEKVLPKHSLLYEYFTVYNELTKVKYVTEGMRKPAFLSGEQKKAIVDLLFKTNRKVTVKQLKEDYFKKIECFDSVEISGVEDRFNASLGTYHDLLKIIKDKDFLDNEENEDILEDIVLTLTLFEDREMIEERLKTYAHLFDDKVMKQLKRRRYTGWGRLSRKLINGIRDKQSGKTILDFLKSDGFANRNFMQLIHDDSLTFKEDIQKAQVSGQGDSLHEHIANLAGSPAIKKGILQTVKVVDELVKVMGRHKPENIVIEMARENQTTQKGQKNSRERMKRIEEGIKELGSDILKEYPVENTQLQNEKLYLYYLQNGRDMYVDQELDINRLSDYDVDAIVPQSFLKDDSIDNKVLTRSDKNRGKSDNVPSEEVVKKMKNYWRQLLNAKLITQRKFDNLTKAERGGLSELDKVGFIKRQLVETRQITKHVAQILDSRMNTKYDENDKLIREVRVITLKSKLVSDFRKDFQFYKVREINNYHHAHDAYLNAVVGTALIKKYPKLESEFVYGDYKVYDVRKMIAKSEQEIGKATAKYFFYSNIMNFFKTEITLANGEIRKRPLIETNGETGEIVWDKGRDFATVRKVLSMPQVNIVKKTEVQTGGFSKESILPKRNSDKLIARKKDWDPKKYGGFDSPTVAYSVLVVAKVEKGKSKKLKSVKELLGITIMERSSFEKDPIDFLEAKGYKEVRKDLIIKLPKYSLFELENGRKRMLASAGELQKGNELALPSKYVNFLYLASHYEKLKGSPEDNEQKQLFVEQHKHYLDEIIEQISEFSKRVILADANLDKVLSAYNKHRDKPIREQAENIIHLFTLTNLGAPAAFKYFDTTIDRKRYTSTKEVLDATLIHQSITGLYETRIDLSQLGGD

SEQ ID NO: 265 - protein, 240 aa, Acetobacter aceti
MANIAENLVFGIDLGIGSCGWAVLNQKAKDENIVALGSWCFDVPETDKERIPTNQIRRANRLLRRVIRRRRNRMAEIRRLFASKGMLDTADPDALAKISADPWEMRAKGLDYQLTPQEFAVALGHIAKRRGFKSAAKRVSTNAPSEDSKMLAALEKTKEQSAQYRTIGEMFARDPAYADRRRNRDGCFDRTMSREDLFKETQILFESQRRLGNFSATSETEQAFIDIAFRQKPMQDSERL

SEQ ID NO: 266 - protein, 400 aa, Acetobacter aceti
SFERFRLLCRLVNLRVTDGLEDRPLTPEELRLACEDAGKTRKLSVKKVRSLIGLRDDQRFTTIPPDQEQHDIAARTGDALTGTATFRAILGESFWRQLLPHPEQLDRAAWIISFHELTDTIISKLATIGLPSEVMELIRKALEDGKFSKFKGAASLSDKAARKLIPFLQEGLTYDKACQKAGYNHAASKFTHYDSIDTKAKFNSLMDDVRDSITNPVARKAISEGMKQVWAMRNQWGLPGAICIELARDVGNSAEKRREIESGIKKNTAQRERERQEAKEHLNQSDISSETLLRYRLWKEQGGRCCYTDQPITPSQLIASDNSVQVDHILPWSRFGDDSYLNKALCTAKANQEKKNRTPWEWIHNQKGVEAWNHFTAAVESRKETRGLKKRNFLLKSSKE

SEQ ID NO: 267 - protein, 376 aa, Acetobacter aceti
YAARVMAEAVRLLYPSGNRAEKGGVKRVFTRPGALTAALRHAWGVESLKKINGKRLNDDRHHALDAAVVAAVSEKEIQKLTKSFQICEQKGLARPMRDVPMPWEGFRHQLETAYADIRVARPERRRARGKGHDATIRQLREEKDGPVVYERRAISDLKLTDLERIKDPERNSAIISSLRTWIEKGKPADYPPQSPKGDEIRKIRVMSRNKPAVSVRGGTADRGEMTRVDVFTKMGKKGKPEWFLVPIYRHQVIDRIQWPQPPNQAAANGKSEKNWPTMGLEHEFRFSLYPRSYVQIVKRDGEIIEGYFAGLDRTVAAFSLLSSSDPTSIQRGIGAKTLESIRKYNVNRFGDISMVEQETRTWHGDVCISPDQPDSA

SEQ ID NO: 268 - protein, 1054 aa, Actinobacillus suis
MKLTPLNYILGLDLGIASVGWAVVEIDEQENPLGLIDVGVRTFDRAEVPKTGESLALARRLARSARRLVKRRADRIKKAKRLLKAENILLSADEHLPNDVWQLRVKGLDQKLERQEWAAVLLHLLKHRGYLSQRKNESKSENKELGALLSGVETNHQILQSAEYRTPAEIAVKKFHVEDGHIRNQRGAYTHTFSRLDLLAEMELLFQRQTDLGNPHTSAKLLENLTALLMWQKPALAGEAILKMLGKCTFEPTEYKAAKNSYSAERFVWLTKLNNLRILEQGAERALTDNERFALLDQPYEKAKFTYAQARTMLALPDEAIFKGVRYQGEDKKAVETKTILMEMKAYHQIRKALENADLKAEWNELKNNSELLDDIGTAFSLHKTDEDICRYLDGKLSESILNALLENLNFDKFIQLSLKALQQILPLMLQGQRYDEAVSAIYGDHYGKKSAEINRLLPTIPADEIRNPVVLRTLTQARKVINAVVRLYGSPARIHIETGREVGKSYQDRKKLEKQQEDNRKQRESAVKKFKEYFPNFVGEPKGKDILKMRLYELQQAKCLYSGKSLELHRLLEKGYVEVDHALPFSRTWDDSFNNKVLVLANENQNKGNLTPYEWLDGKNNSEHWQNFVARVQTSGFSHTKKQRILSHKLDEKGFIERNLNDTRYVARFLCNFIADNMLLTGKGKRKVFASNGQITALLRGRWGLQKVRDDNDRHHALDAVVVACSTVVMQQKITRFVRYEEGNVFSGERIDRETGEIIPLHFPSPWAFFRENVEIRIFSENPKLELENRLPDYPQYNHEFVQPLFVSRMPTRKMTGQGHMETVKSAKRLDEGLSVLKVPLTQLKLSDLERMVNREREVTLYESLKARLEQFGNDPAKAFAEPFHKKGGAVVKAVRVEQTQKSGVLVRDGNGVADNASMVRVDVFTKGGKYFLVPIYTWQVAKGILPNKAVTANVDEIDWLEMDESYQFIFTMYPNDLVKVKLKKEEFFGYYGGLDRATGAIVIKEHDLEKSKGKQGIYRIGVKLALSFEKYQVDELGKNIRPCRPTKRQHVR

SEQ ID NO: 269 - protein, 239 aa, Actinobacillus ureae
MEIRIFSENPKLGLENRLPGYPQYNHEFVQPLFVSRMPTRKMTGKGHMETVKSAKRLDEGLSVLKVPLTQLKLSDLERMVNREREDALYQSLKAHLEQFGNDPAKAFAEPFHKKGGTVVKAVRVEQTQKSGVLVRDGNGVADNTSMVRVDVFTKAGKYFLVPIYKWQVAKRILPNKAVTAGVDEIDWLEMDSSYQFIFTMYANDLVKVKLKKRSILGLLRWFRSCNWGYCYQRTRFREI

SEQ ID NO: 270 - protein, 400 aa, Actinobacillus ureae
MKLTPLNYILGLDLGIASVGWAVVEIDEQENPLGLIDVGVRTFDRAEVAKTGESLALARRLARSSRRLVKRRADRIKKAKRLLKAENLLLSADEILPNDVWQLRVKGLDQKLERQEWAAVLLHILKHRGYLSQRKNESKSENKELGALLSGVATNHQLLQTAEYRTPAEITVKKFQAEENGHGHIRNQRGDYSHTFDRKDLLAEMKLLFQRQAELGNPHTSEKLLENLTTLLLWQKPALAGEAILKMLGKCTFEPAEYKAAKNSYSAERFVWLTKLNNLRILENGIERALTDNERFTLLDQPYEKAKLTYAQARTMLALSDEAIFKGVRYQGEDKKAAEKVALIEMKGYQHIRKALEGAGLKAEWNELKNNSELLDDIGTAFSLYFSISNLPTEIAYFTP

SEQ ID NO: 271 - protein, 1113 aa, Actinomyces georgiae
MSASSQNVERIRYKVGIDVGLRSIGFCAVQVDADDRPVKLLNTVVHVHDAGVSPADAKKADTRKLVSGVARRTRRLYRTRKRRLVDLDRQLDGLGWPLVDPARFADPREPWFAREKLVSGRVDDADERKELLSVALRHIAHHRGWRNPYSTVESLQADAPPSEFLQGLNQRVSEKLGTELDPGLTQGQLVAKLLHRFPNAKIRGPEGILRGKLHQSDNAGELRLICRTQGLDCHITEELVRLVFQAKSPKANKEMRKRIGRDQLPGQGAHIRAEKAHPVFQRFRIVAVLANLRIREAHVDRRLTAEEMRTLTDFLLGLAGSEQPTWEELADNLNIERHQLRGTAKASVDGAPALRFPPIDATTDRIYASKLKWLAEWWRQADEERRGYMVDALSNSGGSEDEPYLDDEIAEMLEQASEEDQAKLDSLHLPGGRASYCLDTLRRLTDAMLGGGLDLFEARKAVFHVDDDWAPPTDPIGAPVGNPPVDRVLKHVARWLEAATGRWGAPQTINIEHVREGLGSEKAARELTRMNDRRRRNNQKLVEEMGEKLGMSGRIRRSDRMRYEAIRRQNCECLYCGQPITYQTMEMDHIVPRAGAASTNSRSNLAAVCRRCNHQKGKLPFAVWAESQDSPAEVRLQDAVQRVRHWLRDAGMGQKELQALRVQVIARLKSKRPDEEFDGRSMESIAWMANELRARVEAQYRGSGTTVRVYRGALTAEARKASGFEGRVNLIGGRGKDRFDRRHHAMDALVIALMNQSVAQTLALRLNMRDSQWLTQSEQTWRQFHGAPGEAARKWEAWDRDMRDASDLFNLALDGGRIPITENVRLRVGNGRVHEDGVIRFKPEYEVKGKTIKGGEARLLGDSLPSEQIDRAETPALWTALTRLPEYDRKSGLPENPDRVIRVNGAVVQATDRIRFFGTPASVAVRGGYAKLGESIHHARIYRINGKTPKYAMIRVYTIDLMRLNHEDIFTAVLKPSTISMRCAEKKLKYAIAEGNAEQIGWLVEGDQLELDAAAYAKGVGADLMREYPMATCWRVAGFPDEAKLRLRPVLLAAEGMGEDAPKFMREVLENQGWRPAVNALLSPGSVRVVRRNVLGEPRFKSSGHLPTTVDLV

SEQ ID NO: 272 - protein, 1101 aa, Actinomyces naeslundii
MWYASLMSAHHLRVGIDVGTHSVGLATLRVDDHGTPIELLSALSHIHDSGVGKEGKKDHDTRKKLSGIARRARRLLHHRRTQLQQLDEVLRDLGFPIPTPGEFLDLNEQTDPYRVWRVRARLVEEKLPEELRGPAISMAVRHIARHRGWRNPYSKVESLLSPAEESPFMKALRERILATTGEVLDDGITPGQAMAQVALTHNISMRGPEGILGKLHQSDNANEIRKICARQGVSPDVCKQLLRAVFKADSPRGSAVSRVAPDPLPGQGSFRRAPKCDPEFQRFRIISIVANLRISETKGENRPLTADERRHVVTFLTEDSQADLTWVDVAEKLGVHRRDLRGTAVHTDDGERSAARPPIDATDRIMRQTKISSLKTWWEEADSEQRGAMIRYLYEDPTDSECAEIIAELPEEDQAKLDSLHLPAGRAAYSRESLTALSDHMLATTDDLHEARKRLFGVDDSWAPPAEAINAPVGNPSVDRTLKIVGRYLSAVESMWGTPEVIHVEHVRDGFTSERMADERDKANRRRYNDNQEAMKKIQRDYGKEGYISRGDIVRLDALELQGCACLYCGTTIGYHTCQLDHIVPQAGPGSNNRRGNLVAVCERCNRSKSNTPFAVWAQKCGIPHVGVKEAIGRVRGWRKQTPNTSSEDLTRLKKEVIARLRRTQEDPEIDERSMESVAWMANELHHRIAAAYPETTVMVYRGSITAAARKAAGIDSRINLIGEKGRKDRIDRRHHAVDASVVALMEASVAKTLAERSSLRGEQRLTGKEQTWKQYTGSTVGAREHFEMWRGHMLHLTELFNERLAEDKVYVTQNIRLRLSDGNAHTVNPSKLVSHRLGDGLTVQQIDRACTPALWCALTREKDFDEKNGLPAREDRAIRVHGHEIKSSDYIQVFSKRKKTDSDRDETPFGAIAVRGGFVEIGPSIHHARIYRVEGKKPVYAMLRVFTHDLLSQRHGDLFSAVIPPQSISMRCAEPKLRKAITTGNATYLGWVVVGDELEINVDSFTKYAIGRFLEDFPNTTRWRICGYDTNSKLTLKPIVLAAEGLENPSSAVNEIVELKGWRVAINVLTKVHPTVVRRDALGRPRYSSRSNLPTSWTIE

SEQ ID NO: 273 - protein, 1181 aa, Actinomyces sp.
MLHCIAVIRVPPSEEPGFFETHADSCALCHHGCMTYAANDKAIRYRVGIDVGLRSIGFCAVEVDDEDHPIRILNSVVHVHDAGTGGPGETESLRKRSGVAARARRRGRAEKQRLKKLDVLLEELGWGVSSNELLDSHAPWHIRKRLVSEYIEDETERRQCLSVAMAHIARHRGWRNSFSKVDTLLLEQAPSDRMQGLKERVEDRTGLQFSEEVTQGELVATLLEHDGDVTIRGFVRKGGKATKVHGVLEGKYMQSDLVAELRQICRTQRVSETTFEKLVLSIFHSKEPAPSAARQRERVGLDELQLALDPAAKQPRAERAHPAFQKFKVVATLANMRIREQSAGERSLTSEELNRVARYLLNHTESESPTWDDVARKLEVPRHRLRGSSRASLETGGGLTYPPVDDTTVRVMSAEVDWLADWWDCANDESRGHMIDAISNGCGSEPDDVEDEEVNELISSATAEDMLKLELLAKKLPSGRVAYSLKTLREVTAAILETGDDLSQAITRLYGVDPGWVPTPAPIEAPVGNPSVDRVLKQVARWLKFASKRWGVPQTVNIEHTREGLKSASLLEEERERWERFEARREIRQKEMYKRLGISGPFRRSDQVRYEILDLQDCACLYCGNEINFQTFEVDHIIPRVDASSDSRRTNLAAVCHSCNSAKGGLAFGQWVKRGDCPSGVSLENAIKRVRSWSKDRLGLTEKAMGKRKSEVISRLKTEMPYEEFDGRSMESVAWMAIELKKRIEGYFNSDRPEGCAAVQVNAYSGRLTACARRAAHVDKRVRLIRLKGDDGHHKNRFDRRNHAMDALVIALMTPAIARTIAVREDRREAQQLTRAFESWKNFLGSEERMQDRWESWIGDVEYACDRLNELIDADKIPVTENLRLRNSGKLHADQPESLKKARRGSKRPRPQRYVLGDALPADVINRVTDPGLWTALVRAPGFDSQLGLPADLNRGLKLRGKRISADFPIDYFPTDSPALAVQGGYVGLEFHHARLYRIIGPKEKVKYALLRVCAIDLCGIDCDDLFEVELKPSSISMRTADAKLKEAMGNGSAKQIGWLVLGDEIQIDPTKFPKQSIGKFLKECGPVSSWRVSALDTPSKITLKPRLLSNEPLLKTSRVGGHESDLVVAECVEKIMKKTGWVVEINALCQSGLIRVIRRNALGEVRTSPKSGLPISLNLR

SEQ ID NO: 274 - protein, 1120 aa, Actinomyces sp.
MNAMKQYNAGIDVGINSVGFAAIEVDSKGLPLNILNNMVVLHDSGVDPGTAKTGATRLANSGTARRTRKLIARRRKRLQKLDRYIEVQGWPLVDFSSLPDPYTPWKIRAKLTQDRLEGEEQGRGLSIALRHMARHRGWRNPYEGVESLHSPKEASKQFKDLKDRVTKVSGVIFDEDATPAEVVCDIGLSPKQRLRSAPSAKYKEGATLADEPVGGKSKEGLLGGKLMQSDNANELRKIGIVQGLSNEKVNEIIDQVFASESPKGQAGKRAKKDELPGQEQYVRALRAHLAFQRFRIVAAVANLRILEAEPKHERLLSQSEKDKVIEFLMSADGDDGVTWSDVAEELGIERECLSGTAKRGADGERPSSFPPTNSTNISIVRSKVKPLIEWWRKASDDEQATLVTALSNADELTDDQPSAETVRQFLSSPDEQSQEKIDKISLPKGRAAYSVNSLERLTRRMLKDSVDLFEARKREFGVDNNWTPTPDSIGEPVGNPAVDRVLKIVNRWLLAVTRKWGPPKVVNIEHVRVGFTSAAQTRKYEEENKTNRERNLAILEELRDKFGTSGKIRREDITRFAALRRQNCQCAYCGEAITFFDCEMDHIVPRKGPGSTNTRNNLVAICERCNKSKSNMPFSLWAQNCDIPGVSVEAVIDRVRTWIKDPELNPKQYNNFKKDVIERLRKTVDDDAIDNRSIESVAWMATELADRIGSHFRTAGANTKVRVYRGWLTSEARKASGFEGKINLIGGRGKTRLDRRHHAMDAATIALMRQSVAQTLVERASIRESDRLRRVVSSSWKDYRGADRDKQFSYGSWLNSMNALAELFNRAIDADGIPVTQNLRLRLGNGEAHDATIRSLEKKRVGASWTIGEIDRASTPQLWLALTRQEDFDQNDGLPANASRELRVKNHWFHAEENVTLFPTKSAAIAVRGGYAEIGNTIHHARLYKLPGKKLTYGMIRVFAIDLLCAWHTDLFSSPLLPESISLRTAETKVRRAVEDGAAMYIGWLVDGDEIVLDPETKAFKSNKIGEYLCEFPGTKRWKVDGFPDKEKLRLRPLQLAGEGLPEDVSAGTEEILGPKGNGWRVAINALFKSSQLVVVRRTALGMVRKLSRRHLPLTTRLRG

SEQ ID NO: 275 - protein, 1095 aa, Actinomyces sp.
MPAHHLRVGIDVGTHSVGLATLRVDDQGTPIELLSALSHIHDSGIGKEGQKDHDTRKKLSGVARRTRHLLRNRRERLQQLDKVLVDLGFPIPKPEEYPDLSERTDPYRVWRVRARLVEETLPEELRGPAISMAVRHIARHRGWRNPYSKVESLLSPAEESSFMKALRKRIMTKTGEVLDDDITPGQAMAQVALTHKIYMRGPEGILGKLHQSDNANEIRKICARQGISSDVCKQLLRAVFKAESPRGSAVSRVAPDPLPGQGSFRRAPKCDPEFQRFRIISIVANLRISETKGENRPLTVDERRQVVAFLMEDSQADLTWVDVAEKLRVSRQALRGTAMLTADGERSAAQPPIDVTDQIMRKTKISALKTWWDKADAERRGAMVRYLYEGLEDSECAEVIAKLPEKDHAKLDSLHLPAGRAAYSRESLTALSDHMLETTNDLHEARKRLFGVDDSWAPPAEPVGAPVGNPSVDRTLKIVARYLSAVESIWGTPEVIHVEHVRDGFTSERTAEERDKANRSRHNDNQKAIEKIQHDYGKEGYISRGDIVRFHALKLQGSACLYCGTTIGYHTCQLDHIVPQAGPGSNNRRGNLVAVCERCNHSKSNTPFAVWAQKCGIPHVGVKEAISRVNGWVEHNHSTSSGDLTRLKKEVIARLRRTQKDPEIDERSMESVAWMANELHHRIAAAYPETTVMVYRGSITAAARKAASIESRINLIGEKGRKDRLDRRHHAVDASVVALMEPSVAKTLAERSSLRGEQRLTGQEQTWKQYTGLTVGARERFEAWRGHMHRLTELFNESLAADEVYVTQNIRLRLSDGSAHTVKASKLVSHRLGDGLTVQQIDRACTPALWCALTREIDFDEKNGLPAREDRVIRVHGQEISSADCIQVFSKRKKTKSDRDEAPFGAIAVRGGFVEIGSSIHHARIYRIEGEKPAYAMLRVFTHDLLSQRHGDLFSAVIPPQSISMRCAATELRQAISEGRATYLGWIVSGDELHIPVETFTTHKIGSFLKDYPNTTRWRICGYDSETMLILKPRILSAEGLNNSSDIAEYVIKNKGWRVAINKLAKVHPTVVRRDALGRPRHSSRSNLPVTWSIE

SEQ ID NO: 276 - protein, 1144 aa, Actinomyces sp.
MSMIDSSENVPGIRYRVGIDVGLKSIGFCAVEVDRNDQPVRMLNSMVFIHDAGVDPNENKAAKSRKLTAGVARRTRRLYRTRHQRLVNLDRVLSKEFGWPLPDLTSFKDPREPWHVRAGLLEGYIADDEKRKEALSIALRHIARHRGWRNPYAKVETLLQPSEPSDFLKGLNDRISEELGRAFPADATPGQLVDTYLAHPDYVGRAGTPKLRGPQGILAGKLHQSDNAQEIRGICDVQRIEPAERDRLIRVVFEAKSPKGSAKERGLVGYDELPGQGRHVRAEKAHPAFQLFRMVSVLANLRIREGREERPLTPDELEDLVDFINQVSLKQEVTWQDLADKLRIERADLRGTAKASFDGSPVLRNPPTDVTTEKIMACKVKWLKEWWKEADDEQRGYMVDAFSNSGGSEDGTDVNDEVAELLEQATEDDQLEFEKISLPQGRAAYSLDSLRRLTDRMLRDGVDLHTARRLEFNVGDDWKPAVEPIGAPTGNPAVDRVLKQVSRWLHAATERWGEPTVINIEHARDGLGSERVARELMRENEKRRKANASAVAEMAAKLKLSGKVHRSDQIRYFALQRQNCQCLYCGAPITYTTAEMDHIVPRADGSSTNDRSNLAAVCRTCNHMKGKIPFAVWASSDKANQGVSLTGALERVNMWQRDSGMSPRQLKQLQREVCARLKSKKPDQEFDGRSMESVAWMAVELRTRIEGFYRSRDEESVPSVGVYRGQLTAEARRASGFESRVNLIGGRGKTRFDRRHHAMDALVIALMNPSVSRTLALRLNMRDAQRLTGVEETWKHFYGKPGEASKRFESWRESMLRGVELFNIALSDNAIPFVENIRLRVGSSVIHDATVHSFCPPKTPDGKQIITKGYGEQHSLGSAMPVELIDRAETPALWTALTRCPDFDPKKGLPENPQRTISVNGTRVGPTELVNFFEFSKSGPKACLKVRGGYVDLSGAIHHARIYRIAGKKTAYAMIRVFQVDLLRLKDHDVFTTPLKPSTISMRTAEPKIREALANGTATQIGWLVEGDELVIDTSKYSGGFIGEVLARYPEATSWRVAGFMTPAKLRIKPILLSKEGFVDETQAALLGVEVTSEAIQKTVDRPGWLPAVNVLFGAGGVRVIRRNCLGEERYHSSASLPVSMTLE

SEQ ID NO: 277 - protein, 1103 aa, Actinomyces sp.
MTKINDDLRYRVGIDVGLKSIGFCAVEVDENDQPLRLLNSMVFVHDAGVDPNENKAAKSRKLTAGVARRTQRGTAQNRRRLAELDRALSEELNWPLPNLEDFEDSYEPWHTRAELVEHYIKDDAERAEALAIAIRHIARHRGWRNPYLSVDSLLTPQEPSKFLRGLNERVTQALGREFPADATPGQLICAYIDSPKYAETQGIRGDSGILSGKLHQFDNVGEIRKICEVQRLDHDVFKLLVRKVFFAKSPRGSAAGLVGHDQIPGQGKYIRAEKAHPDFQLFRIVAVLTNLRIREGKAERCLTPDELRGLVDYILEVQLKQQVTWADLADNLGIERTDLRGTARASFDGSPALRFPPTDVTAEKIMASKVKWLKDWWDKADSERRGFMVDALSNSGGSTGDNDIDDEVAALLEAATEDEQAELEKIQLPQGRAAYSLDSLRRLTKRMLEEGVDLHTARKEEFNVDDDWRPEPEPIEAPVGNPAVDRVLKQVARWLNMATDRWGVPDVINIEHTRDGLGSEKVARELLRESQKRQDLNQKDMDKMIRELGISGKARRSSLIKYQAIQRQNSMCLYCGTEIGFETAEMDHIVPRALSGSTNDRSNLAAVCRACNHQKGAVPFAVWATSGEAHAGVSLEDAIKRVRLWQKGPGMSPKQHKAFQNEVISRLKSRKPDEEFDGRSMESVAWMAVELRTRIDGYYRKVNSDSVPKVGIYRGQLTAEARKASGFENRVNLIGGKGKTRFDRRHHAMDALVIAMMNQSVSQTLALRVNMRESQRITGQEETWKNFYGKPGQASERFEKWREGMLRAVELFNIELAKNAIPFHENVRLRVGSSKVHDDTVRKFIHAKLGEALSVAMIDCAETPALWTALTRLPDFDPKDGLPEDLSREIYIHSRKITADEQLNFFNSPSACLKVRGGYVEIGSSIHHARVYRIDGKKTTYSMVRVFATDLVKMTHEDVFTTPLKPSTISMRTADPKIRKALADGTATQIGWLVEGDELQLETDKYSGGLIGEVLAEYPQLTSWRVAGFYGVTQLRLRPYMLAAEGIPSDASESLRKVIEGKGWLPAINALLSSGCVKVVRRNCLGEPRFNAKSSLPVSQLLR

SEQ ID NO: 278 - protein, 1114 aa, Actinomyces turicensis
MQFHFYMVYVTMKGMNDKDASQQLRYRVGIDVGTHSIGFCAVEVDESGMPIQLLNSMVHKHDSGIDPGGNDTATTRLAEAGVARRTRRLIRRRKKRLQELDAFIEECGWPLVDLATITDARSPWRIRAHLATEHIDDEAEQGKLLSIALRHMARHRGWRSPYARISSLHIQADPSEQLKALAQRVSEKTGISLTADQTPAQLISVYLDVFETGKLRGPEGILGGKLMQSDNANELRRIATVQGLDNDLLKKIIGFVFAAESPKGSAAKRVGKDVLPGAHGLRAEKAHPAFQQFRIVSIVQNLRIKEGTGLRALTSEETEIVVDFLNQAGLTEAPTWEEVADNLEIPRSHLKGTATEGFDGIAPSTRPPFDVTSQKILNGKLKKLSAWWKDADYDHRCAMVNALSNVGSDDEGSLADDDVREFLSDFTDEELEALDKVELPGGRAAYSVDSLEKLTNTMLSEGCDLHSARKIAFGVDDSWTPPAEPIGQPVGNPAVDRVLKQVARWISAATNQWGTPESVNIEHVRDALGSEKASREYQRSLQTRRIRNEKLFAEMRERLDIGGKPRRSELTRYLALQRQNCQCLYCGMPITYTDAEMDHIVPRKGAASTNTRENFAAVCRACNHQKSNLPFAVWAEKTERPGVSVKEAYKRVSDMRIEPGMNGRQMNEFRKAIRLRLTTKHADAEIDGRSLESVAWMANELRHRIEGFYRSAENDVTVRVFRGAVTAEGRRASGFESRVNLIGGKGKTRLDRRHHAMDALTIALMEPGIAQTIALRMNMRESQRVLGEQETWKSFTGGSDTARKRWEHWCEEMLRASELFNVFLAEDRIPICQNKRLRLGSSAVHKAIVQPFEASDKRIVSDAMPVELIDRASTPALWTALTRDPDFDPKEGLPANPSRTIRLHDKRLGPNETVEFFPTAAACLAIRGGYCEIGAGIHHARIFRISGKKTTYAMLRVYQCDLVRFQKENLLTVELPANTISVRTAVPKLREALAHGTAEQIGWLVVGDELKIDLSGFTTGQIETFNETYPQATRWEVTGFPTKTQLRLKPLLIASEGLADDVPDDIVKIVKGPGWWPAIDKLLKIGNVVLYRRDTHGKPRVVSHRSLPLSSKLQ

SEQ ID NO: 279 - protein, 1113 aa, Alcanivorax sp.
MRYRVGLDLGTASVGAAVFSMDEQGNPMELIWHYERLFSEPLVPDMGQLKPKKAARRLARQQRRQIDRRASRLRRIAIVSRRLGIAPGRNDSGVHGNDVPTLRAMAVNERIELGQLRAVLLRMGKKRGYGGTFKAVRKVGEAGEVASGASRLEEEMVALASVQNKDSVTVGEYLAARVEHGLPSKLKVAANNEYYAPEYALFRQYLGLPAIKGRPDCLPNMYALRHQIEHEFERIWATQSQFHDVMKDHGVKEEIRNAIFFQRPLKSPADKVGRCSLQTNLPRAPRAQIAAQNFRIEKQMADLRWGMGRRAEMLNDHQKAVIRELLNQQKELSFRKIYKELERAGCPGPEGKGLNMDRAALGGRDDLSGNTTLAAWRKLGLEDRWQELDEVTQIQVINFLADLGSPEQLDTDDWSCRFMGKNGRPRNFSDEFVAFMNELRMTDGFDRLSKMGFEGGRSSYSIKALKALTEWMIAPHWRETPETHRVDEEAAIRECYPESLATPAQGGRQSKLEPPPLTGNEVVDVALRQVRHTINMMIDDLGSVPAQIVVEMAREMKGGVTRRNDIEKQNKRFASERKKAAQSIEENGKTPTPARILRYQLWIEQGHQCPYCESNISLEQALSGAYTNFEHILPRTLTQIGRKRSELVLAHRECNDEKGNRTPYQAFGHDDRRWRIVEQRANALPKKSSRKTRLLLLKDFEGEALTDESIDEFADRQLHESSWLAKVTTQWLSSLGSDVYVSRGSLTAELRRRWGLDTVIPQVRFESGMPVVDEEGAEITPEEFEKFRLQWEGHRVTREMRTDRRPDKRIDHRHHLVDAIVTALTSRSLYQQYAKAWKVADEKQRHGRVDVKVELPMPILTIRDIALEAVRSVRISHKPDRYPDGRFFEATAYGIAQRLDERSGEKVDWLVSRKSLTDLAPEKKSIDVDKVRANISRIVGEAIRLHISNIFEKRVSKGMTPQQALREPIEFQGNILRKVRCFYSKADDCVRIEHSSRRGHHYKMLLNDGFAYMEVPCKEGILYGVPNLVRPSEAVGIKRAPESGDFIRFYKGDTVKNIKTGRVYTIKQILGDGGGKLILTPVTETKPADLLSAKWGRLKVGGRNIHLLRLCAE

SEQ ID NO: 280 - protein, 1146 aa, Alicyclobacillus hesperidum
MAYRLGLDIGITSVGWAVVALEKDESGLKPVRIQDLGVRIFDKAEDSKTGASLALPRREARSARRRTRRRRHRLWRVKRLLEQHGILSMEQIEALYAQRTSSPDVYALRVAGLDRCLIAEEIARVLIHIAHRRGFQSNRKSEIKDSDAGKLLKAVQENENLMQSKGYRTVAEMLVSEATKTDAEGKLVHGKKHGYVSNVRNKAGEYRHTVSRQAIVDEVRKIFAAQRALGNDVMSEELEDSYLKILCSQRNFDDGPGGDSPYGHGSVSPDGVRQSIYERMVGSCTFETGEKRAPRSSYSFERFQLLTKVVNLRIYRQQEDGGRYPCELTQTERARVIDCAYEQTKITYGKLRKLLDMKDTESFAGLTYGLNRSRNKTEDTVFVEMKFYHEVRKALQRAGVFIQDLSIETLDQIGWILSVWKSDDNRRKKLSTLGLSDNVIEELLPLNGSKFGHLSLKAIRKILPFLEDGYSYDVACELAGYQFQGKTEYVKQRLLPPLGEGEVTNPVVRRALSQAIKVVNAVIRKHGSPESIHIELARELSKNLDERRKIEKAQKENQKNNEQIKDEIREILGSAHVTGRDIVKYKLFKQQQEFCMYSGEKLDVTRLFEPGYAEVDHIIPYGISFDDSYDNKVLVKTEQNRQKGNRTPLEYLRDKPEQKAKFIALVESIPLSQKKKNHLLMDKRAIDLEQEGFRERNLSDTRYITRALMNHIQAWLLFDETASTRSKRVVCVNGAVTAYMRARWGLTKDRDAGDKHHAADAVVVACIGDSLIQRVTKYDKFKRNALADRNRYVQQVSKSEGITQYVDKETGEVFTWESFDERKFLPNEPLEPWPFFRDELLARLSDDPSKNIRAIGLLTYSETEQIDPIFVSRMPTRKVTGAAHKETIRSPRIVKVDDNKGTEIQVVVSKVALTELKLTKDGEIKDYFRPEDDPRLYNTLRERLVQFGGDAKAAFKEPVYKISKDGSVRTPVRKVKIQEKLTLGVPVHGGRGIAENGGMVRIDVFAKGGKYYFVPIYVADVLKRELPNRLATAHKPYSEWRVVDDSYQFKFSLYPNDAVMIKPSREVDITYKDRKEPVGCRIMYFVSANIASASISLRTHDNSGELEGLGIQGLEVFEKYVVGPLGDTHPVYKERRMPFRVERKMN

SEQ ID NO: 281 - protein, 1552 aa, Anaerophaga sp.
MFSQRNNPYCELLQNVKQLYKEKFGKTNQVDNSIIYGFMKRILGLDLGTNSIGWALVENDENDRKGKIIGMGSRIIPMDMSELDNFNKGASISKTAERTRLRMTRRLRERHLLRRARLHRILNIMGFLPEHYRNSIDFIDKKGCFFEGQEPKIAYKPDKNSEQFCFLFTSSFHEMLEDFRKFQPELIQNRKKVPYDWTIYYLRKKALTQKISKEELAWIILNFNTKRGYYHLRGEDEDNQDNKKIKEFRALKVVNVTEREGANSSGKKWYDMELENGWVYSRQSNLPPNLEGKTIELIVSYTLDNNGNIKKDKNGKEKYSLSMPGEEDWNLVKIKTENDLKTSKKSVGEYIYDHLLKNPDQKIRGKLISTIERKFYKEELSRILKTQMNFYEELKNRELYQKCVEELYPNNKSHQQTLLQKDFIHLIVEDIIFYQRPLKSKRAFVNNCPLEYRVYVDKKSGELIKSGVKCIPKSHPLFQEFRLWQYVRNLRIYERERMVNGRLMVNVDVTNELLPDEEHIVRLFDLLNDRKSFKQDDVLRFVGIKSPKDRKRYSWNYPEDKELPGNETRHLILAWLKKVDGVPEDWLDPEKLKALWHLLYSVTDREEIIKGLHSFAKKYELPDTFVEHFKKIPRLEREYGSFSEKAIKKLLPLMRMGKYWKAEEIPADLLEKAQKIIDAEADDRISDEVREKLLHLKDISQLKGLPLWQASYLVYGRHSETGEVVKWRTSEDLEKYILQFKQHSLRNPVVEQVILEALRVVKDIWEHYGEGKEGFFNEIHVEIGRELKNPADKRKKITSQIQENENTNLRIKALLEELFNDPSVKNVRPYSPAQQEILRIYEDGVLNGQKEIPDDILKISKMARPSKSQLVKYKLWLEQKYRSPYTGEIIPLSQLFTSAYEIEHIIPQARYFDDSFSNKVICEAEVNREKGHQLAFEFITKRGGDEIELNFGKKVTILNVEEYQKFVKDHYGRSLRSLSKMRKLLMEDIPDDFIDRQLNDSRYISKVVRNLLSNIVRAEDENSLVSKHLITCTGGVTTRLKHEWGLNDVWNELITPRFVRLNKMGKEKFGEWINKKGKQVFQIQMPLELQKGFNKKRIDHRHHALDALVVACASRSHVNYLNNDSARANASETRYDLRNKLCYKDKTDSNGNYRWKFYKPWESFTEEAKNRLAGTVVSFKSNRRIMTRSSNRYFKWVDTSEGKKKKLVRQIKGDNQAIRKPLHKDTVLGKVSLRKEKKVSLSKAIDLWESIVDKPLKKRIQSLREQGYDKKLLLKYFKDRNNQFNGQDISRVNIYFFDNNLAARRVTLDASFNSEKRIDGITDSGIKKILYAHLQNEKYHGKKDEKGNEISPYELAFSPEGLEEMNANIKKLNGGKPHCPIYKVRLAETIGEKFKLGEKGNKNKKYVEAAKGTNLFFAVYVDEKGVRSFETIPFSVALERRKQKLAVVPEENENKEKLLFYLSPNDLVYVPDEDEKLIDYRQLSINPTRIYKMVSSSGTQCFFIPHFVASPIVQTMELGPNNKSERAWDGQMIKNVCYKLSVDRLGNVKIEK

SEQ ID NO: 282 - protein, 1515 aa, Anaerophaga thermohalophila
MKRILGLDLGTNSIGWALVESDEEQKSGKIQGIGSRIIPMDQNELDNFNKGNTVSQTAERTRLRMVRRLRERHLLRRERLHRVLKEIGFLPEHYLEQIDFTEKPGGFLPGKEPKIAYKPDNFKDKYDFLFQDSYHEMLSDFQDKNPEFIQKRKKVPQDWTIYYLRKKALTAKITKEELAWIILNFNQKRGYYQLRGEDEDVAKNTKKEEFHALKVVKVKEREDSEGASGKWYDIELENGWVYPRQSNIRPDWEGKILELIVTYNLDKDGNIKTDKEGNEKRSFRMPNKDDWTLRKKRTENEIEKSGKTVGEYIYDNLLDAPDLKIRGKLVSTIERKYYRSELEQILTAQKKYHPELSNSELFNKCISNLYPNNDIHRKALLSKDFVHLIINDIIFYQRPLKSKRSTVSNCPLEYRVYVDKVTGEKKKVPLKCIPKSHPLYQEFRLWQYVKNLRLFEKERFENGRLLTNVDVTEQFLPDEDKYVELFEFLNGRKTFKQDDILKFAGIKSAKDRVKYYWNYPQEKEYPGNETRYLIESRLKKIENVPDEWLNYEKIEELWHLLYSVTDKVEIEKGLQSFAAKYQLPDLFVEVFKGFPRMEREYGAFSKKAIKKLLPLMRMGKYWKLENINPDLIEKVQKIIDGEADDNINDGIRERFSEINEMSDLRGMPLWKASYLVYGRHSEAAEVIRWRTSADLDQYIKDFKQHALRNPIVEQVVLEALRVVKDVWNYFGEGREKFFDEIHVEIGRDLKNPADKRQKIANQIQENENTNLRIKALLVELFNDPEVQNVRPYSPVQQQLLKIYEDGVLNAERDIPDDIQKISRMANPTRNQLIRYKLWLEQKYRSPYTGEIIPLNKLFTSEYEVEHIIPRARYFDDSFSNKIISEAEVNRKKDRMLAFEFIKKLGGSTIDLNYGKKVSVLTVEEYQQFVKDHYGINPHSRLKMQKLLMDEIPESFIERQLNDSRYISKMVRNLLSNIVREENENSPVAKQLITCSGSITNTLKQEWGLNDVWNTIITPRFERLNKMGEQKYGEWVNKEGKPVFQIQMPLELQKGFNKKRIDHRHHALDALIVASATRSHVNYLSNEAAKTNAKDTRFDLRNRLCYKEKRGQNRNFTWRFYKPWNTFTEDAKNALNDIVVSFKSNHRVINKSTNRYFKWENLPGGMKKKRLVRQEKGDNWAIRQSLHKDTVLGKVSLRKVKPVSLSVALDSWNNIVDKALKKKIRSLKDQGYDKKLMLKYFKDRRNEYNGENISRVNVYYFDEEMAARRVDLDTSFNSEKRIEGITDSGIKKIIYAHLKNEKYHGQKDDKGKDISPYELAFSPEGIAEMNANIKQLNGGKPHCPIYKVRLAEPVGEKFQLGETGNKTEKLVEVAKGTNLFFGVYANDEGVRSFATVPFYLAVEREKQGLPAVPQENENGDQLLFWLSPNDLVYVPSEEDAHFANPKQIELDNSRIYKMVSSTGTQCFFIPHFVATPIVQTIELGPNNKSERAWDGQMIKKVCYKLSVDRLGNVEIE

SEQ ID NO: 283 - protein, 333 aa, Bacillus cereus
MMNPNNFTKEDFWRTIILYGLNQATYKIALGQSLIRFSEQQRNVVSMNELAEDFFDMYLERLKNGKPQLATPNRQTAMERIINSYNIGRLTRSQAIEKVEREAFNDVIDRFHTVDSLQVPMKFYEKTDKGIVIFDNVFEIFSDNNNFELRNELDARWDLLESAFEIKRTDSQLVNDIRKLYLANGYERTDITKNRSVLNGYQSNVCFYCGELMSDDDVHVDHVIPRQLINHDDIWNLVLSHGFCNQQKSDNLPDVNYIEKLIERNEYFIKSNHPISNKLKERLGNTPRRRRTTIDRIYEHAKLVLAPWKGIYGYNPATDPFYKTFIRNIVLSK

SEQ ID NO: 284 - protein, 1068 aa, Bacillus cereus
MRYVLGLDIGIASCGWAVINQEKERIEDLGVRIFDKAENPKDGKSLAAPRRDARSTRRTLRRKKHRMQRIKILLVKQGLLFKTELNHLYESATEFDVWNLRLDALERKLHPKEFARVLIHLAKRRGFKSNRKETTLSENGQILESISENQQIMEQQNYRTVGEMILKDKKFENHKRNKDGTYIGTVTRQQLQDEIQMIFHTQRLYKNDYATEEFESSYLEIWASQRPYASKDQIEKMIGYCTLEPKEKRTPKASWSFQYFVALQTINNLRLISKDKIEELSFEEKKQIMNLALEKPIVKYIDIRKLLSIPNDFQFNSLSYSADTVDTTLENKRCIELKEYHSINKVYKQVYGKNTPNLLPIDYDTIAYGLTIFKDDKDILEYLQNKYVNAKGKPIKNLAKKTYDDTFIQALLNLNFTKMGHLSFKALKNIIPFLEEGLSYDKACEKAGYNFKGTSYTERTKYLPVIPQNTNPVVHRALSQTRKVINAIIKKYGSPNAIHIETARELSKTFQERKEIDSRYQDNSKKNEHAIHKLKELGNINPSGINIVKFKLWSEQDGRCMYSGKYIEPHRLFEEGYTEVDHILPYSRSLDDSYNNKILTLGTENQRKGNKTPYEYMGNTSIWDEFETRVQSNKKINFKKQQKLLLQNFSYAREQEFIERNLNDTRYATIYLTSLIQQHLIFSESSSKKKVRTVSGIITSHLRSRWGFNKDRKEGHIHHALDAVIVAVTSNHMIQRVTKYYKLKELNKNLQAKQLPFPEPWEGFRLELEARISPNTQQYLKGIHFKNYADVNLSDIKPIFVSRMPKRSITGELHQETIRKFLGYNEKGKVLTAIKTKLEDIPFDANGDFPMYGKETDLYTYNAIKERYLSHEKDKRKSFQEPLYKPTKSGEIGPLIKSIKIMDTRTIVNPVNQGKGVVYNSKIARTDVFKKEDKYYLIPIYTIDLLKNILPHKAITAGKGYEDWTTIDSSFTFLFSLFPNDLIQIVPSKNKTIKARTTVSKKEILLPSLTGYFKGVHSGTAGITVETHDGSVIANVGSKQLLLFEKYQVDVLGHYTKIKEEKRMGMAI

SEQ ID NO: 285 - protein, 1078 aa, Bacillus cereus
MRYVLGLDIGIASCGWAVINQEKERIEDLGVRIFDKAENPKDGKSLAAPRRDARSTRRTLRRKKHRMQRIKVLLVKHGLLSKTELDHLYESATEVDVWNLRLDALERKLYPKEFARILIHLAKRRGFKSNRKETTLSENGQILESISENQQIMEKQNYRTVGEMILKDKKFENHKRNKNGTYVGTVTRQQLQDEIQMIFHAQRLYKNDYATEEFESSYLEIWASQRPYASKDQIEKMIGYCTLEPKEKRAPKASWSFQYFVALQTINNLRLISKDRIEELSFEEKKQIMNLALEKSIVKYIDIRKLLSVPNEFQFNSLSYSADTVDTAVESRKCIELKEYHSINKVYKQIYGENALNLLPKYYDTIAYGLTIFKDDKDILEYLQNKYVNAKGKPISNFANKTYDDTFIQALLNLNFTKMGHLSFKALKNIIPFLEEGLSYDKACEKAGYNFKGTSYTEQTKYLPVIPQNTNPVVHRALSQTRKVINAIIKKYGSPNAIHIETARELSKTFQERKEIDSMYQDNSKKNEHAIHKLKELGNINPSGINIVKFKLWNEQDGRCMYSGKYIEPHRLFEEGYTEVDHILPYSRSLDDSYNNKTLTLGTENQRKGNKIPYEYMGNTSIWNDFETRVQSNKKINKKKQQKLLLQHFSYAREQEFIERNLNDTRYATIYLSSLIQQHLIFSESSRKKKVHTVSGIITSHLRSRWGFNKDRKEGHIHHALDAVIVAVTSDHMIQRVTKYYKLKELNRNLQAKRMPFPEPWEGFRLELEARISPNTQQYLKGLRFKNYADVNLSEIKSIFVSRMPKHSITGELHQETIRKFIGYNEKGKVLTAIKTKLEDIPFDANGDFPMYGKESDLYTYNAIKERYLSHKKDKRKSFQEPLYKPTKSGGIGPLIKSIKIMDTRTIVNPVNQGKGVVYNSKIARTDVFKKEEKYYLIPIYTIDLMKNILPQKAITAGKGYEDWTTIDPSFTFLFSLFPNDLIQIVPSKNKTIKARTTVSKKEVLLPSLTGYFKGVHSGTAGITVETHDGSVIANVGSKQLLLIEKYQVDVLGNYTKIKEEKRIGLTTYNDNKKIAAC

SEQ ID NO: 286 - protein, 1088 aa, Bacillus smithii
MNYKMGLDIGIASVGWAVINLDLKRIEDLGVRIFDKAEHPQNGESLALPRRIARSARRRLRRRKHRLERIRRLLVSENVLTKEEMNLLFKQKKQIDVWQLRVDALERKLNNDELARVLLHLAKRRGFKSNRKSERNSKESSEFLKNIEENQSILAQYRSVGEMIVKDSKFAYHKRNKLDSYSNMIARDDLEREIKLIFEKQREFNNPVCTERLEEKYLNIWSSQRPFASKEDIEKKVGFCTFEPKEKRAPKATYTFQSFIVWEHINKLRLVSPDETRALTEIERNLLYKQAFSKNKMTYYDIRKLLNLSDDIHFKGLLYDPKSSLKQIENIRFLELDSYHKIRKCIENVYGKDGIRMFNETDIDTFGYALTIFKDDEDIVAYLQNEYITKNGKRVSNLANKVYDKSLIDELLNLSFSKFAHLSMKAIRNILPYMEQGEIYSKACELAGYNFTGPKKKEKALLLPVIPNIANPVVMRALTQSRKVVNAIIKKYGSPVSIHIELARDLSHSFDERKKIQKDQTENRKKNETAIKQLIEYELTKNPTGLDIVKFKLWSEQQGRCMYSLKPIELERLLEPGYVEVDHILPYSRSLDDSYANKVLVLTKENREKGNHTPVEYLGLGSERWKKFEKFVLANKQFSKKKKQNLLRLRYEETEEKEFKERNLNDTRYISKFFANFIKEHLKFADGDGGQKVYTINGKITAHLRSRWDFNKNREESDLHHAVDAVIVACATQGMIKKITEFYKAREQNKESAKKKEPIFPQPWPHFADELKARLSKFPQESIEAFALGNYDRKKLESLRPVFVSRMPKRSVTGAAHQETLRRCVGIDEQSGKIQTAVKTKLSDIKLDKDGHFPMYQKESDPRTYEAIRQRLLEHNNDPKKAFQEPLYKPKKNGEPGPVIRTVKIIDTKNKVVHLDGSKTVAYNSNIVRTDVFEKDGKYYCVPVYTMDIMKGTLPNKAIEANKPYSEWKEMTEEYTFQFSLFPNDLVRIVLPREKTIKTSTNEEIIIKDIFAYYKTIDSATGGLELISHDRNFSLRGVGSKTLKRFEKYQVDVLGNIHKVKGEKRVGLAAPTNQKKGKTVDSLQSVSD

SEQ ID NO: 287 - protein, 1069 aa, Bacillus thuringiensis
MNYDIGLRIGITSCGWSIINKDLERIEDLGVRVFEKAENPDGTASAAPRREARKSRRKHRRKKHRIERIKRLIVQHDLLSKKELDSLYLSPFNIDVWNLRVEALERKLDNREFARVLIHLVQRRGFQTIRKSVEIQEEGKLLENVSENERIMKVNGYKTVGEMFSKHEKFTHHKRNKDGSYTSVVTRSLLLKEIKTIFNSQRILGNVFSTQKLESDYLYIWGSQRPTLTYEQLMSMVGNCIYEKKEKRAPKTSWAFQYFSLLQKINKLKVSDDNTLRKLSKEERDIVIELAFKKKNVSFVDIRKALKLNDNTKFNHLTYSHVVETKKVEKATFIELKGYHLIKKQLKDRNVELTQELQPKDYDAIAAASTFFKNDIEFRDYLRNQYLDSNGKRKSNIANKVFEDKVIAAVFELNFSKVCHLSFKSLYKLIPHLEKGLDYKEAILCAGYNFRDENKRDKKLFLPVIQQETNPVVHRALTQARKVINAIIREYGSPNTIRFVVANDLAKTYKQRKELESTLKKNRAENEKIKTKLLSMGIINPTGMDIVKYKLWYEQSGICLYTGRQMELSSLFKPGYSIVNHIIPYNRSFDDTYHNRVLTLTETKYEKGNKIPFEYFGAEETCWNEYEKRVSTSKKIHDKKREKLLIRNFDIEYENEMISNNVFDTHYIGSYFEKYIDEHLQFKKSTKKQKVFSIHGNMVAHLHSRWGFNKNSREIYLNHAVDAAIVAVLTDQLIRNIADYYRRDNILEQKGSLKFPEPWKSFSIELEARISPQVRDLIKKLNLDSYLDVDILHIKPVFISKKPRRKVNGEAHKSTIRSLIGINEIGKTVTCIKTRLEDIPFDENGDFPMYGKDTDKYTYTAIKERYLEFNKDKEKAFSTPLYKLKRNGEPGNQIKSVKIIDTRNIVNKVNQGKGIAYNSNIIRVDVFSRDQKYYVVPIYLRDFIKGSLPNKIITAAKGFMQWPETDNSYTFLFSIFPNDLIKVVPKEGKFIKAKNENKENINLTEILGYFKGLDSSTGAFTLESHDGSLLARGIGTKNLLLIEKYQVDVLGRYNKVGNEERQDIKIQQN

SEQ ID NO: 288 - protein, 206 aa, Bacteroides cellulosilyticus
MKKILGLDLGCNSIGWALVNEAENTEEISSIIKLGVRVNPLTVDEMQNFEKGKSITTNADRTLKRSMRRNLQRYKLRRDTLIEVLKEHGFITDSTLLSEHGNKTTFETYRLRAKAAVEEISLEKFARVLLMINKKRGYKSSRKAKGSEDGVLIDGMDVARKLYEEGLTPGELCLQILEAGKKNLPDFYRSDLQNEFDRIWNFQKLV

SEQ ID NO: 289 - protein, 349 aa, Bacteroides coprosuis
MKKILGLDIGTNSVGWAVVNTNQEGEPSQIEKLGSRIIPMSQDILDKFGQGQTVSSTASRTDYRGIRRLRERSLLRRERLHRVLHILDFLPKHYADSIGWDPRNSKTYGKFLPGTEVKLAWVPTADGHQFLFYSTYLEMLEDLKQTQAQLFETSQTPVPLDWTIYYLRKKALTQPITKHELAWLLLHFNTKRGYYQRRGELEDTPTDKLVEYHALKVVDVEVDPEDQSKKPWYFVHLENGWIYKRQSSEPLDNWKGLVKEFIVTTHLDKEGKPKLDKEGEVRRSFSSPKEDDWTLVKKKTENDLEKSGLTVGAYIYQTLLNKPNQKIRGGLIKHIERNYYVEELEQILR

SEQ ID NO: 290 - protein, 1504 aa, Bacteroides coprosuis
MKKVLGLDIGTNSVGWAVVNQNDKGEFLSIEKIGSRIIPMSQDVMDKFGAGQTESSTAQRTQYRGVRRLRERSLLRRERLHRVLHILHFLPQHYDAAIGWNKKENKTYGKFLPGVEVNIPWVATDQGHQFIFMDSYAEMLKDLKQHQPHLFEKSSTPVPLDWTIYYLRKKALTQAISKEELAWILLNFNQKRGYYQLRGEEVEDNTKREEFYALKVVKVELDKDNTSAKTWYKVHLENGFIYPCPSDTPIDSWVGMVKDFIVTTTLEKDGSEKRTADGEIKRSFRAPKEDDWTLLKKKTESELEKSGKQVGAFIYDTLLSNPDQKIIGGLIKTIERKYYKKELEQILETQQKFIAELSDKKLFQACAEELYPLNDSHRENLLERDFKHLFVQDIIFYHRPLKTKKSLISNCTYEYRTFYKNGEKQISPIKCIAKSNPLFQEFRVWQFVQNLRILQRQRSEGDSIKYNVDVTAEFLKDENDIANLFTWLNERKVIKQDQLLKSYFKLKVNKETKELDYRWNYVDDKNKEYPCNATRTHILSFLEKCKEEKRIEDDRFVYSLWHLLYSVVEPIELRGALAKFAEREHLHPSFVDVFAQFPPLEKEYGSYSEKAIKRLLPLMRMGDYWHEDKIDVKTKQRIQRIIDGEADDDITHRSREKVENLRSITDFKGLPLWKAGYVVYNRHSESGELTKWKTPHELSNYIQNEFKQYSLRNPIVEQIVLETLRVVHDLWVKHGDFSEIHLELGRDIKNSSDKRKRMAERQQENENSRQRVLEMLIDLKKEAAFADLNPYSPSQQEKLRIVEDGVLRSNIEIPKDIEKITKSAKPTSRELTKYRLWLDQKYRSPYTGQPISLAQLFTSKYEIEHVIPQAKYFDDSFTNKVICESEVNKEKGSMLAHEFILKNGGSTVNVGGRQVQVLKNDAYVELINRLYGKNNPVKAKKLLAEDIDEVVGDFSERQLNDTRYISRVVQKLLSNIVREEDEQESTSKHVIGCSGQVTTALKKDWGLNDIWNKIIQPRFERLNEMTATEDYGVWQSPNHFQIRVPEEIQKGFTKKRIDHRHHAMDALVIACATRSHINYISNRSGQDRNAKFETTRTDLRSKLCYKENSSGNNYNYIFNKPWDTFTQDAHRALENIVVSHKQNLRVLTKTNNYTQFINKDGKKDLQKQVKGDHFAVRKPMHQETIYGRVSIRSIKEVALKKALENWKQIVDRTLKDKIRELIGAYGKYDAQTILKYFKDRDYKFNNLKINRVEVYEYDHNCAAVRKSIGDDLTIKQIERITDESIRKILMNHLSNYDDNLKEAFSPEGLMEMNKNIKELNGGKNHQPIYKVRLFEDLGSKFPLGVSHNNPDKYAIAAKGTNLFFGIYEDQEGKRMFDSIPLNIVIDRLKEKKSPVPETYNESKLKFHLSPNDLVYVPTDEEQKQPELVDVDHLSDEQKGRVYKAVSFTGNRAFFVNHRVSKVIHDYVEFGTKNKIENDDDKRSLKHICWKLKVNRLGEITDVKR

SEQ ID NO: 291 - protein, 1509 aa, Bacteroides eggerthii
MKTILGLDLGTNSVGWAVINSVIKEQAERIWIEMAGSRIIPMDAAVLGDFDKGNSISQTSERTRLRGARRLRERQLLRRERLHKVLNILGFLPNHYLEYIDFEKHPGKFLADAEPKLAWVKDEQGKYTFLFQAAFDEMLADFAIHQPSLVSGDKKIPYDWTIYYLRKKALTEMISKEELAWILLNFNQKRGYYQLRGEEEEDNAGKSVEFYALKVLTVEATDEKKGRDVWYNVHLENGWIYRRSSSVPLDWEGQVKEFIVTTDLNPDGTPKLDKYGEVKRSFRAPKEDDWMLIKKRTEADIANTHKTVGAYIYDTLLQKPQQKIIGKLVKTVERKLYRDELSLILQKQCAFHAELQDRALYARCVEALYPSNEVRRKNIANRDFVYLLMDDILFYQRPLKTKKSLIANCPYEENEYVDRETGEIKKTPLKCIAKSHPLFQEFRLWNFLSNIRIYQKEKEINGTLHLDVDVTAEFLKTEDDYVALFDWLNSRKEIEQKTFLKYPKFGLKKEISNYRWNYVEDKQYPCNETRHAILSSLEKANVCIDFLSNEKEVALWHILYSVSDKQEIEKALRTFAAKNGLDESFVEAFKKFPPFKSEYGAYSAKAIKKMLPLMRCGKYWDVSSIDDTTKERIKKIVTGEYDERISVKVRDKVMNLSDISCFRRLPLWLACYIVYNRHSEDKEAVKWESPADIDAYLASFKQHSLRNPIVEQVITETLRVVRDIWKQVGRIDEIHIELGREMKNPADKRKRMTAQILENENANLRIKALLAEFMNPEYEIENVRPYSPSQQEILRIYEDTVLHAEDQLPEEIDAILKKFNSSKVPTKSEFLRYKLWLEQKYRSPYTGELIPLGKLFTAAYEIEHVIPQSRYFDDSFSNKVICESAVNKLKDNQLGYEFIKNHHGQKVEVGFGKSVEIFSVDSYERFVKEQYAKSAVKMKKLLMDDIPEQFIERQLNDSRYISKVIKGLLSNIVREKNDSGEYEPEAVSKNIVVCTGSVTDRLKRDWGMNDVWNSIVYPRFERLNSLTDTQSFGHWENKSGKKVFQTELPLEYQKGFSKKRIDHRHHAMDAIVIACATRNHVNYLSNESASRNAKISRYDLQRLLCDKNRTDDNGNYKWVIKKPWDTFTQDAREVLSKIVVSLKQNLRIINKTTNVYRHLDATGNRVYEKQKTGDSWAIRKPMHKDTVFGAVNLRKVKVVRLSVALDTPAMIVDKRVKNKVFELLSYKYDKKRIEKYFKENAFLWKELDLAKVAVYYFTEATTEPLVAVRKPLDSTFNEKKIKESVTDTGIQKILLNHLCTKEGKPDLAFSAEGIEEMNRNLLQLNNGKSHQPIYKVRVYEPRGNKFSVGVLGNKGTKWVEAAKGTNLFFAIYITEDGKRTYETIPLNVVIEREKQGLVPVPDRNKKGDKLLFWLSPNDLVYLPTEEEREFGRINEPIDRGRIYKMVSCTGNEGHFIPANVANPIVPVIELGSNNKAQRAWTNEMIKDICIPIKVDRLGHIIEVKYRIDE

SEQ ID NO: 292 - protein, 1526 aa, Bacteroides faecis
MKKILGLDLGTNSIGWAVLNAADDNSLKYIEAAGSRIIPMDAAILGDFDRGNSISQTAERTRIRGMRHLRERYLLRRARLHRILNLLGFLPFHYAQDIDRYGNFSADMEPKIAWCKNLEGELEFIFIESFNEMLEDFRKNQPELVADNKKVPYDWVIYYLRKKALEKKISKEELAWILLNFNQKRGYYQLRGEDDDESMKTAKTRQYFDKQIIKNIIDTNQTYKGQRILIVELQNGDKGKIFKKEIPDWIGQEKNIIVTVDIDKDGNDKYEESGSLSCRFKIPTDAEWESEWKLIKMKTQKDLDESNKTVGTYIYDSILQNPTQKVRGKLVRTIERKYYKAELKQILEKQTEFHSELQDKDLYIECLNELYSNNDTHRNAITDRDFVYLFMNDILFYQRPLKSKKSLIDNCPYERNIYIDKETGEIKYSPIKCIAKSHPLFQEFRLWKFISSIRIYQRESVVEVVDKQLDLFSSQSTSVQKLVTDVDVTDKFLTCENDYVALFEWLNKKKIIDQKEFLKYRPFGLKGDIDNYRWNYVEDKSYPCNETHAMILTYFAKAGISEDILTKEMEEALWHILYSVEDRQEITKALRTFASKYHLSDSFVKVFSNIPPFKKEYGSYSAKAIKKLLSLMRMGKYWSEDAIDVNTRERIDKIVTGEYDEKIRDRVREKTIRLNDIRHFRALPDWLACYVVYDRHSETREITEWKSPEEIDEYIRNFKQHSLRNPIVEQVITETLRTVRDIWKQVGCIDEIHVELGREMKNPADKRKRITSQIIENENANLRVKALLTEFVNSEFEIENVRPYSLSQQDILRIYEDGVLNSVAEVPGDIAGILKKFNENDAKKRPTTSEILRYKLWLEQKYRSPYTGEMIPLSKLFTSAYEIEHVIPQSRYFDDSFSNKVICEAEVNKLKDNALGYEFIKKHHGEKVELGFGKIVEIFSVSVYEQFVKDNYSRNRGKMKKLLMDEIPEQFIERQLNDSRYISKVVKTLLSNVVREKAEQEAVSKNVIVCTGGVTDRLKKDWGINDVWNKIVLPRFLRLNELTNSTNFTAKNAAGNEIPAMPLELQKGFNKKRIDHRHHAMDAIVIACANRNIVNYLNNESASRKAKISRHDLQAILCDKVRTDDKGNYQWRVKKPWDTFTQDVYVALENIIVSFKQNLRVINKTSNYYWHYENGKKVLVKQVKGDSWAIRKPMHKDTVFGEVNLRKVKSVSLNEALKNPQFIVEKDLKRQLLSLLQQNFDIKKIKKYFEEHKDIWSDISLSKMNIYYFTKETKDRYFATRKPLDASFDKKKIESCITDTGIQQILLRHLELKENDPERAFSPDGIDEMNRNIIQLNKGKGHHPIAKVRVYEKADKFEVGQRGNKSSKFVEAAKGTNLFFAVYETEYPDEKTNSIVRKRNYATIPLNIAIERQKRGLSTAPEDEKGNVPSFVLSPNDLVYLPTSEDIVNGHITQPIDKSRIYKMVSSSGSQCFFIKHNIANIIVDKYEFSPLNKMERAISNEMIKEICIPVKVDRLGNIVKLGKSE

SEQ ID NO: 293 - protein, 1509 aa, Bacteroides fluxus
MKTILGLDLGTNSVGWAVINSVIKEQAERIWIEMAGSRIIPMDAAVLGDFDKGNSISQTSERTRLRGVRRLRERQLLRRERLHKVLNILGFLPNHYLEYIDFEKHPGKFLSDAEPKLPWVKDEQGKYTFLFQAAFDEMLADFAIHQPSLVSGDKKIPYDWTIYYLRKKALTEMISKEELAWILLNFNQKRGYYQLRGEEEEDNAGKSVEFYALKVLTVEATDEKKGRDVWYNVHLENGWIYRRSSSVPLDWEGQIKEFIVTTDLNPDSTPKLDKYGEVKRSFRAPKEDDWMLIKKRTEADIANTHKTVGAYIYDTLLQKPQQKIIGKLVKTVERKLYRDELSLILQKQCAFHAELQDRTLYARCVEALYPNNEVQRRNIANRDFVYLLMDDVLFYQRPLKTKKSLIANCPYEENEYVDRETGEIKKAPLKCIAKSHPLFQEFRLWNFLSNIRIYQKEKEINGTLHLDVDVTAEFLKTEDDYVALFDWLNSRKEIEQKTFLKYPKFGLKKEISNYRWNYVEDKQYPCNETRHAILSRLEKANVCIDFLSNEKEVALWHILYSVSDKQEIEKALRTFAAKNGLDESFVEAFKKFPPFKSEYGAYSAKAIKKLLPLMRCGKYWDVSSIDDTTKERIKKIVAGEYDERIAVKVRDKVMNLSDISCFKRLPLWLACYIVYNRHSEDKEAVKWESPADIDAYLASFKQHSLRNPIVEQVITETLRVVRDIWKQVGRIDEIHIELGREMKNPADKRKRMTAQILENENANLRIKALLAEFMNPEYEIENVRPYSPSQQEILRIYEDMVLHAEDQLPEEIDAILKKFNSSKVPTKSEFLRYKLWLEQKYRSPYTGELIPLGKLFTAAYEIEHVIPQSRYFDDSFSNKVICESAVNKLKDNQLGYEFIKNHHGQKVEVGFGKSVEIFSVDSYERFVKEQYAKSAVKMKKMLMDDIPEQFIERQLNDSRYISKVIKGLLSNIVREKNDSGEYEPEAVSKNIVVCTGSVTDRLKRDWGMNDVWNSIVYPRFERLNSLTDTQSFGHWENKSGKKVFQTELPLEYQKGFSKKRIDHRHHAMDAIVIACATRNHVNYLSNESASRNAKISRYDLQRLLCDKSRTDDNGNYKWVIKKPWDTFTQDAREVLSKIVVSLKQNLRIINKTTNVYRHLDATGNRVYEKQKTGDSWAIRKPMHKDTVFGAVNLRKVKVVRLSVALDAPTMIVDKRVKNKVFELLSYKYDKKRIEKYFKENAVLWKELDLARVAVYYFTEATTEPLVAVRKPLDSTFNEKKIKESVTDTGIQKILLNHLCTKEGKPDLAFSAEGIEEMNRNLLQLNNGKRHQPIYKVRVYEPRGNKFSVGVLGNKGTKWVEAAKGTNLFFAIYITEDGKRTYETIPLNMVIEREKQGLAPVPDKNEKGDKLLFWLSPNDLVYLPTEEELEFGRINEPIDRGRIYKMVSSSGNQCFFIPQSISNAIIPTKELGANNKAERSWDGAMIKNICIPVKVDRLGRIIEVKYRINE

SEQ ID NO: 294 - protein, 1436 aa, Bacteroides fragilis; identical to SEQ ID NO: 160

SEQ ID NO: 295 - protein, 1512 aa, Bacteroides nordii
MKNILGLDLGTNSIGWAVINSEEDGPIVKKRIELAGSRIIPMDAAVLGNFDSGVTKSQTAERTSFRSIRRLRERQLLRRERLHKVLQILGFLPEHYVNDIDFENHPGKIKRNTEPKLPWRKNSMGQFEFIFQDSFEAMLTDFATHQPVFVSEGKKVPYDWTLYYLRKKALTEGISKEELAWLILNFNQKRGYYQLRGEEEEEQSNKLVEFYALRVVKVEATDDKKGKDTWYNVHLENGWIYRRTSNIPLDWEGKVKEFIVTTDLNEDGTPKLDKYGEVKRSFRAPKEDDWTLIKKKTESDIANSHKTVGCYIYDALLQNPHQKIKGRLVRTVERKFYKEELRLILEKQLSFHPELQDRDLYRACIDALYVSNEAHKNNISGRDFVYLFIDDIIFYQRPLKTKKSLIDNCPYEENQYMDRETGEVKQAPIKCIAKSHPLFQEFRLWQFISNIRIYQRERVLDDGKLETDVDVTPDFLKTEDDYTTLFEWFNDRKEVDQKAFLKNPQFGLKKTFTEYRWNYVEDKSYPCNETRNAILNGLQKAGVSADFLSREVEEALWHILYSVEDKIEIESALRKFASKHDLDDRFADVFKKLPPFKKEYGAYSAKAIKKLLPLMRIGKYWELSNIDDKTKERIDKIITGEWDENIHDRVREKAIKLSDITDFKGLPLWLSCYVVYNRHSEARAIAKWESPEDIDSYLRLFRQHSLRNPIVEQVITETLRTVRDIWKRVGQIDEIHVELGREIKNPADKRAKMTAQIVENENTNLRIKALLAEFINSEYEIENVRPYSSNQQEKLKIYEDTVLNGVKEIPEDINTILKKFRESDLKKRPTKSDFLHYKLWLEQKYCSPYTGRIIPLGKLFTSAYEIEHIIPQAHYFDDSFSNKVICEAEVNGLKDKKLGYEFIKHNPGKMVEIGFGKPPVRIFSVEEYERFVKENYSGIKNKMNKLLMDDIPETFIERQLNDSRYISKVVKSLLSNIVREKDSNGEYEPEAISKNVIVCTGSVTDRLKRDWGVNDVWNSIIYPRFERLNELTGSQQFGCWENKEGKRVFQTAVPLEMQKGFSKKRIDHRHHAMDAIVIACATRNHINYLSNESASKKAKISRTDLQRLLCTKCRTDDNGNYKWIVKKPWPAFTQDIRKALENITVSFKQNLRVINKTTNYYVHFDESGKKVLEKQINGDSWAIRKPMHKDTVFGKVNLQKVKEVRLSLALDTPKMIVDKKLKEKVLQLYSYKYDKKRIDKYFKENASLWKDLNLSKVAVYYFTNDSTEPLVAVRKPLDTSFNAKKIKESVTDTGIQKILLNHLSNNQDDPNLAFSPDGIDKMNKNLTALNDGKYHQPIYKVRVCEPQGNKFSVGTSGNKTSKYVEAAKGTNLFFAVYQTEDGKRSYETIPLNVVIEREKLGWTPVPENNNNGDKLLFWLSPNDLVYVPTADELNNGMRLDNMDKGRIYKMISCSGPQCFFIPQNVSNAIIPVIELGANNKAEKSWNNEMIKVVCVPIRVDRLGCITQINNQK

SEQ ID NO: 296 - protein, 779 aa, Bacteroides oleiciplenus
MKEGNQYDVACEYAGYRHSKSSLTREEIDNKVLKNRLEILPKNSLRNPVVEKILNQMVNVVNAVIDTYGKPDEIRVELARELKKGAKEREELAKSIAQNTREHEAIRQLLQTEFGMMHVTRNDIIRYKLYEELKDNGYKTLYSDQYIPREKVFSKEIDIEHIIPQARLFDDSLSNKTLEYRAVNIEKGNKTAYDFVKEKYGNDGLRRYLNHCEALFKDKKTKLKKLKMEDQDIPDGFIDRDLRNTQYIAKKALSMLSEISRRVVATTGSITDELRKDWQLVDIMKELNLPKYEALGFVETFKDKDGRIIKKIKDWSKRNDHRHHAMDALTVAFTKDVFIQYFNNKNAFWMSGSKEHANITAIKNKYFEKGKALAPIPLELFRTEAKHHLENILVSIKAKNKVVTNNINRTKKKNGENLKLQQTPRGQLHLESIYGSYRQCIIRDEKVNASFDASKIANVSKSAYRNALLKRLEAYDNDPKKAFTGKNSLDKNPVYLDENKMEKVPDRVKIVEFETVYTIRKPIDPKLSIDKVVDARIRTLLKKRLEEYGGDAQRAFSNIEENPIWLNKEKGISVKRVAIRGISNAQALHDKKDKDGNPILDKEGKGIPTDFVNTSNNHHVAIYRKPVVDKMGQVILDENGSPRYELGEDVISFFEAVARVNLRQPVVDKDYKRSEGWQFLFSMKQNEYFVFPNEKTGFNPKEIDLLNPENYALISPNLFRVQKIGLNDYTFRHHLETSIQNNSNELKFITWIRCGKNGINGVIKVRVNHIGQIVSMGEY

SEQ ID NO: 297 - protein, 653 aa, Bacteroides oleiciplenus
MKKILGLDLGSSSIGWALVNEGANDEEKSSIIKLGVRVNPLTVDEAQNFEKGKSITTNADRTLKRGMRRNLQRYKQRREALVEVLKKHEFITAGTLMSEQGNKTTFETYRLRAKAVEEEISLEEFARVLLMINKKRGYKSSRKAKGDEDGVLIDGMDVAKKLYDEDLNPGELCLQLLEAGKKTLPDFYRSDLQDEFDKIWNFQKQFNPESFCDTAKEEVRGKNRTQTWTILSKYFVWTEGDSVWNNEEARTEERIKEYKLVGIKRTTKGYEQKLENYRWRVQALSEQLNPEIIAIVLQEINGQISASSGYLGAISDRSKELFFNHQTVGQSLMSELDKNPNGSLRNKVFYRQDYLDEFNTIWEKQSLYHKELTVELKKEIRDIIIFYQRRLKSQKGLISTCEFEQREIIVEKDGKRKTKIIGCKVIPRSHPLFQEFKIWQTLNDVEVYVADRRTKRKQDRKSTTLFSDTEDILLVEGKRYLYQEEKELLAKELFVRENMKKAEVLKLLFEDPKELDLNFKQIDGNRTGFALFSAYSKMIEKYGYESVNFKNSADEIIEKLQIIFADLGWNTELFSIDLSKDDKELEKQPYFRLWHLLYSFEGDNTPTGNGKLIEALMRLCSVEKEYASVLANVSFQEDYGSLSAKAIKKYYLI

SEQ ID NO: 298 - protein, 1436 aa, Bacteroides sp.
MKRILGLDLGTNSIGWALVDEAENKDERSSIVKLGVRVNPLTVDELTNFEKGKSITTNADRTLKRGMRRNLQRYKLRRETLMEVLKEHKLITEDTILSENGNRTTFETYRLRAKAATEKISLEEFARVLLMINKKRGYKSCRKAKGAEEGTLIDGMDIARELYNNNLTPGELCLQLLDAGKKYLPDFYRSDLQNELDRIWEKQKEYYPEILTEVLKEELRGKKRDAVWAICAKSFVWEEYYTEWNKEKGKTEQQEREHKLEGIYSKRKRDEAKRENLQWRVNGLKEKLSLEQLVIVLQEMNIQINNSSGYLGAISDRSKELYFNKQTVGQYQMEMLDKNPNASLRNMVFYRQDYLDEFNTLWEKQAEYHKELTGELKKEIRDIVIFYQRRLKSQKGLVGFCEFESRQIEVEIDGKKKIKTVGNRVIPRSSPLFQEFKIWQILNNIEVTVVGKKGKRRKQKDNSPTLFDGLDDTEQLELNGSRYLYQEEKELLAQELFVRDKMTKSDVLKLLFDNPQELDLNFKTIDGNKTGYTLFQAYSKMIEMSGHEPVDFKKTVEKVVEHVKAVFDLLNWNTDILGFNSNEELDNQSYYKLWHLLYSFEGDNTPTGNARLVQKITELYGFEKEYAIILANVTFQDDYGSLSAKAIHKILPHLKEGNRYDVACAYAGYKHSESSLTKEEIANKALKDRLTLLPKNNLRNPVVEKILNQMVNVINAIIDTYGKPDEIRVELARELKKNAKEREELTKFIAETTRKHEEFKILLQSEFGLTNVSRTDILRYKLYKELESCGYKTLYSNTYIPREKLFSKEFDIEHIIPQARLFDDSFSNKTLEARSINLEKGNKTAYDFVKEKFGESGADNSLDHYLNNIEDLFKSGKISKTKYNKLKMAEQDIPDGFINRDLRNTQYIAKKALSMLNEISRRVVATSGTITDKLRQDWQLVDVMKELNWEKYKALGLVEYFEDKDGRQIGRIKDWTKRNDHRHHAMDALTVAFTKDIFIQYFNNKNASLNSNTNEYAIKNKYFQNGRAIAPIPLREFRVEAKKHLENTLISIKAKNKVVTGNINKTKKRGGVNKYLQQTPRGQLHLETIYGSGKQYLTKEEKVNASFDMKKIATVSKSAYRDVLLKRLHENDNDPKKAFTGKNSLDKQPIWLDKEQTRKVPEKVKTVTLETIYTVRKEISPDLKVDKVIDAGVRKILTGRLNEYGNDAKKAFSNLDENPIWLNKEKGISIKRVTISGISNAQSLHVKKDKDGKPILDEDSRNIPVDFVNTGNNHHVAVYRRPVIDKRGQLVIDEAGNPKYELEEVVVSFFEAVTRANLGQPIIDKDYKTSEGWQFLFSMKQNEYFVFPNEKTGFNPKEIDLLDAENYGVISPNLFRVQKFAHKNYVFRHHLETTIKDTSSILKGITWIDFRSSKGLDAIVKVRVNHIGQIVSVGEY

SEQ ID NO: 299 - protein, 1510 aa, Bacteroides sp.
MKRILGLDLGTNSIGWALVDSEEQRILGMGSRIIPMDQGVLDTFSGGNPVETQTAARTAYRGTRRLRERALLRRERLIRVLNMMKFLPEHYASQIDFEKRLGQFFDEKEPKLAWKQNDEGRFEFIFQQSFNEMIEEFKNKGVVREDKKIPYDWTIYYLRKKALSQEIEKEELAWILLNFNQKRGYYQLRGEEEEENPNKLVEYYSLKIVDVIADEKPNSKGDIWYSLHLENGWIYRRSSKIPLFGWKDKTRDFIVTTDLNDDGTVKKDKEGIEKRSFRAPSENDWVLLKKKTESDIEKSHKTVGAYVYETLLQNPMQKVRGKLVRTIERKFYKDELKQILEKQREFHPELRDEDLYNDCVRELYRSNETYQFILSKRDFVHLFLDDILFYQRPLRSQKSAIGDCILEFKTYKDKDGNNIKEYLKVISKSNPLYQEFRIWQWLYNLKIYRKEDDEDVTLQFIANIEDKEQLFDFLSNRKSIEQKPLLEYLIKAKGLKKQVKTEAYRWNYVEDKIYPCSETKTMISTRLAKVENIPDNFFTKEIEQKLWHIIYSVTDKNEFEKALRTFAKKYDLDIASFVDNFKKIPPFKNEYGSFSEKAIKKLLPLMRLGKYWKWNDIDNNTQNRISKIITGEYDEEIKDIVREKSIALTNENDFQGLQLWLAQYLVYGRHSEADIAGKWHSVADLEKYLNEFKQHSLRNPIVEQIITETLRVVRDIWRKYGQGAENFFSEIHVELGRDMKNTADERKKIVNVVTENENTNLRIKALLMELKNNSDGKLEVENVRPYSPTQQDILKIYEEYAISTGLDNEKDEKVKEDIKKISRVAQPTTTELQRYKLWLEQKYCSPYTGKVIPLGKLFTEEYQIEHIIPKSRYYDDSFSNKVICEAAVNKLKDKCLGLEFIKNYHGQIVETGFGQKVTIFDEEAYQNFVKQHYAYNRSKRTKLLLEEIPEKMIERQMNDTRYISKFVLPLLSNLVRAEENDNGVNSKNVLPVNGKITTMLKQDWGLNDVWNDLILPRFVRMNELAKTIAFTSWNEQHQKYLPTVPLELSKGFQKKRIDHRHHAMDALVIACATRDHVNLLNNKHANTDTIRYDLQRKLRLFERVTYIDPQTKNNVTKDIPKEFKKPWDNFTVDARNELEKIIVSFKQNLRIINKATNIYTKYENGKKIKVGQKGLNWAIRKPLHKETVFAKVSLRKRKTVRLSEALKDWKKIVDKKLKQEIKRLTCQYGKFDVDTILRYFKDRKYQFGEVDVSKVKMYYFDEENAAVRKNVDTSFTEKFIQGSVTDTGIQKILLNHLEAKGNKVEIAFSPEGIEEMNKNIIQLNEGKLHLPIFKVRVYETIGNKFSVGVKGNKKDKYVEAAKGTNLFFAIYVDENGIRSYETIPLNIVIERLKQGLSVVPEKNRKEHSLLFYLSPNDLVYVPIEDERENIHAVNLDQLNNEQRKRIYKMVSCTGSECHFVPYYVASPIVNKVEYSSLNKIGRSLTGEMIKDVCIKLKVDRLGNVKGISGL

SEQ ID NO: 300 - protein, 1436 aa, Bacteroides sp.
MKRILGLDLGTNSIGWALVNEAENKDERSSIVKLGVRVNPLTVDELTNFEKGKSITTNADRTLKRGMRRNLQRYKLRRETLTEVLKEHKLITEDTILSENGNRTTFETYRLRAKAVTEEISLEEFARVLLMINKKRGYKSSRKAKGVEEGTLIDGMDIARELYNNNLTPGELCLQLLDAGKKFLPDFYRSDLQNELDRIWEKQKEYYPEILTDVLKEELRGKKRDAVWAICAKYFVWKETYTEWNKEKGKTEQQEREHKLEGIYSKRKRDEAKRENLQWRVNGLKEKLSLEQLVIVFQEMNTQINNSSGYLGAISDRSKELYFNKQTVGQYQMEMLDKNPNASLRNMVFYRQDYLDEFNMLWEKQAVYHKELTEELKKEIRDIIIFYQRRLKSQKGLIGFCEFESRQIEVDIDGKKKIKTVGNRVISRSSPLFQEFKIWQILNNIEVTVVGKKRKRRKLKENYSAIFEELNDAEQLELNGSRRLCQEEKELLAQELFVRDKMTKSEVLKLLFDNPQELDLNFKTIDGNKTGYALFQAYSKMIEMSGHEPVDFKKPVEKVVEYIKAVFDLLNWNTDILGFNSNEELDNQSYYKLWHLLYSFEGDNTPTGNGRLIQKMTELYGFEKEYATILANVSFQDDYGSLSAKAIHKILPHLKEGNRYDVACVYAGYRHSESSLTREEIANKVLKDRLMLLPKNSLHNPVVEKILNQMVNVINVIIDIYGKPDEIRVELARELKKNAKEREELTKSIAQTTKANEEYKTLLQTEFGLTNVSRTDILRYKLYKELESCGYKTLYSNTYISREKLFSKEFDIEHIIPQARLFDDSFSNKTLEARSVNIEKGNKTAYDFVKEKFGESGADNSLEHYLNNIEDLFKSGKISKTKYNKLKMAEQDIPDGFIERDLRNTQYIAKKALSMLNEISHRVVATSGSVTDKLREDWQLIDVMKELNWEKYKALGLVEYFEDRDGRQIGRIKDWTKRNDHRHHAMDALTVAFTKDVFIQYFNNKNASLDPNANEHAIKNKYFQNGRAIAPMPLREFRAEAKKHLENTLISIKAKNKVITGNINKTRKKGGVNKNMQQTPRGQLHLETIYGSGKQYLTKEEKVNASFDMRKIETVSKSAYRDALLKRLYENDNDPKKAFAGKNSLDKQPIWLDKEQMRKVPEKVKIVTLEAIYTIRKEISPDLKVDKVIDVGVRKILIDRLNEYGNDAKKAFSNLDKNPIWLNKEKGISIKRVTISGISNAQSLHVKKDKDGKPILDENGRNIPVDFVNTGNNHHVAVYYRPVIDKRGQLVVDEAGNPKYELEEVVVSFFEAVTRANLGLPIIDKDYKTTEGWQFLFSMKQNEYFVFPNEKIGFNPKEIDLLDVENYGLISPNLFRVQKFSLKNYVFRHHLETTIKDTSSILRGITWIDFRSSKGLDTIVKVRVNHIGQIVSVGEY

SEQ ID NO: 301 - protein, 1424 aa, Bacteroides sp.
MKRILGLDLGTNSIGWALVNEAETDEEVSSIIRLGVRVNPLTVDETQNFEKGKSITTNAERTLKRSMRRNLQRYKLRRDALVEFLKELGFITDETILSEQGNRTTFETCRLRAKAAEEEISLEELSRVLLMINKKRGYKSSRKVKKEEDGVLIDGMEIAKKLYEEDLTPGQLCSQLLESGKKVLPDFYHSDLQEELDRIWSVQKQFHPDVFCDAAKEEIKGKNRSQTWAILANYFVWKEEVVGWNDREAKNETIEKECKLVGLKRTTKGYELKKENYRWRAQALTEQLGLEEIAVVLQEINGQINASSGYLGAISDRSKVLYFNHQTVGQYQMAELDKNPHASLRNMVFYRQDYLDEFDRIWEKQAEFHKELTAELKKEIRDMIIFYQRRLKSQKGLISFCEFERLEIVVEKDGKKQTKVIGCKVIPRSHPLFQEFKVWQTLNDIKVLGREKKRNALSASESRALYPEEKEILARELAIKENMKKADVLKLLFENPQELDLNFKQIDGNRTGFSLFSAYSKMIEKYGYEPLDFKKPADEIIGQLRTIFTDLGWNTNLFTIDLTKEGKELEMQPYFRLWHLLYSFEGDNTSTGNGKLIEKIMQLCGVEKEYAVELASLSFQDDYGSLSAKAIKRILPYLKEGNLYDVACEYAGYRHSKSSLTKEEIENKVLKGKLEVLPKNSLRNPVVEKILSQMVNVINTIIDTYGKPDEIRVELARELKKSAKEREELTKAIAKSTREHEEIRKLLQDEFGMMNVSRNDIIRYKLYEELKDNGYKTLYSNQYIPKEKIFSKEIDIEHIIPQSRLFDDSLSNKTLEYKAINIEKGNKTAYDFVKEKYGEEGLQQYINRCESLFNDKKAKLRKLKMEQKDIPDGFIDRDLRNTQYIAKKALAMLNEICRRVVATTGSITDQLREDWQLVDVMKELNLPKYEALGFVETYEDKDGRKIKRIKDWTKRNDHRHHAMDALTVAFTKDAFIQYFNNKNAAQDSGNRNHTNIIGIKTRYFDKGRALPPIPLEQFRIEAKQHLEKLLVSIKAKNKVVTVNVNRTKKRKGENTKIQQTPRGQLHLETVYGSHKQYVTKIEKVNASFDAAKIATVSKRAYRNALLKRLETFGNDPKKAFTGKNALEKNPLYADKYQTIRVPEKVQTVEFETIYTIRKPVDPALNVDKVVDVKVRAILERRLKEYGGDPKKAFVNFWENPIWLNKEKGISIKRVSIRGINNAQSIHVKKDKNGNPIWDENGKQIPVDFVNTGNNHHVAIYRKPVLDKKGQVTFDEDGNLMYELDEVVVPFFEAVTRANLGLPIIDKDYRKSEGWQFLFSMKQNEYFVFPNEKTGFNPKEVDLLNPDNYAMISPNLFRVQTMSKVMYGNNVVRDYKFRHHLETTVKDMKELKDIAYKQYKTLSFGNSVVKIRINHIGQIVSVGEY

SEQ ID NO: 302 - protein, 1055 aa, Bacteroides sp.
MRIYRKDLAQDVDVTNELLKTEEDYVALFDWLNGKKEIDQKAFLKYPLFGLKKEVENYRWNYVQDKPYPCNETRSSMLARLEKCDISIEFLTKENEEALWHILYSVEDKNEIVKALQKFADKHDLNASFVDVFQKFPPFKKEYGSYSAKAIKKLLPLMRMGKYWSENSIDKGTRERMDKIITGEYDEKIENRVREKAIHLADVSDFKGLPLWLVCYIVYGRHSEAKEITQWKSPADIDLYLRSFKQHSLRNPIVEQIIIETLRVVRDIWKQVGNIDEIHVELGREMKNPADKRKKMTQQMSENENTNLRIKYLLTEFLNPEYEVENVRPYSPSQQDILRIYEEGVLNSVSDLPEEISDILKKFTETDLKKRPSRSEVLRYKLWLEQKYRSPYTGEVIPLGKLFTPAYEIEHVIPQSCYFDDSFSNKVICEAEVNKLKSNLLGHEFIVKHHGEIVELPFGKKVRIFTVDEYEQFVKDNYSRTRSKMKKLLMDDIPEEFVARQLNDSRYISKVVKSLLSNIVREKGEEEAISKNVIPCTGGVTDRLKKDWGINEVWNKIILPRFQRLNELTGTNKFTTKNVGIQEIPTMPLELQKGFNKKRIDHRHHAMDAIIIACANRNIINYLNNESATAKAELSRYDLQKMLCDKAKTDNNGNYKWVIRKPWASFTQDTYLALENIIVSFKQNLRVINKATNHFLHYNEEGKKIFVKQGKGDNWAIRKSMHKDTVFGEVNLRRIKTVALNEAMKNPQSIVVKDFKRKLLELWNLGFDAKRIKKYFEDNRETWSDINLSKIEVYYFSKDTKDRFFATRKPLDTSFDRKKIENNITDTGIQKILLRHLELKDNNPDIAFSPDGIDEMNRNIIQLNNGKYHQPIIKVRWYEQADKFAVGQTGNKSSKFVEAAKGTNLFFAVYESNILDKKTNTIIKKRNYATIPLNVAIERQKQGLPVAPEDENGNDPIFVLSPNDLVYLPTAADLANGIIAQPLDRGRIYKMVSCTGNEGYFIPARIANPILQTIELGSNNKAQKAWTDEMIKEICMPIKVDRLGNVLESSSSYKK

SEQ ID NO: 303 - protein, 1055 aa, Bacteroides sp.
MRIYRKDLAQDVDVTNELLKTEEDYVALFDWLNGKKEIDQKAFLKYPVFGLKKEIENYRWNYVQDKPYPCNETRSLMLARLEKCDISIEFLTKENEEALWHILYSVEDKNEIVKALQKFADKHDLNASFVDVFQKFPPFKKEYGSYSAKAIKKLLPLMRMGKYWSENSIDKGTRERIDKIITGEYDEKIENRVREKAIHLADVSDFKGLPLWLVCYIVYGRHSEAKEIIQWKSPADIDSYLRSFKQHSLRNPIVEQIIIETLRVVRDIWKQVGNIDEIHVELGREMKNPADKRKKMTQQMSENENTNLRIKYLLTEFLNPEYEVENVRPYSPSQQDILRIYEEGVLNSVSDLPEEISDILKKFTETDLKKRPSRSEVLRYKLWLEQKYRSPYTGEVIPLGKLFTPAYEIEHVIPQSCYFDDSFSNKVICEAEVNKLKSNLLGHEFIVKHHGEIVELPFGKKVRIFTVDEYEQFVKDNYSRTRSKMKKLLMDDIPEEFVTRQLNDSRYISKVVKSLLSNIVREKGEEEAISKNVIPCTGGVTDRLKKDWGINEVWNKIILPRFQRLNELTGTNKFTTKNVGIQEIPTMPLELQKGFNKKRIDHRHHAMDAIIIACANRNIINYLNNESATAKAELSRYDLQKMLCDKAKTDNNGNYKWVIRKPWASFTQDTYLALENIIVSFKQNLRVINKATNRFLHYNEEGKKIFVKQGKGDNWAIRKSMHKDTVFGEVNLRRIKTVALNEAMKNPQSIVVKDFKRKLLELWNLGFDAKRIKKYFEDNRETWSDINLSKIEVYYFSKDTKDRFFATRKPLDTSFDRKKIENNITDTGIQKILLRHLELKDNNPDIAFSPDGIDEMNRNIIQLNNGKYHQPIIKIRWYEQADKFAVGQTGNKSSKFVEAAKGTNLFFAVYESNILDKKTNTIIKKRNYATIPLNVAIERQKQGLPVAPEDENGNDPIFVLSPNDLVYLPTDDELANGIIAQPLDRGRIYKMVSSSGEQCFFIKHIVANVLVDKFEFSPLNKMERALTGEMIKMICIPIKVDRLGNVLESSSSYKK

SEQ ID NO: 304 - protein, 286 aa, Bacteroides uniformis
MLSYKYDKKKIEKYFKENAFLWKELDIAKVAVYYFTENTTEPLVAVRKSLDSTFNEKKIASVTDTGIQKILLNHLKSKEGKAELAFSAEGIEEMNRNLLQLNDGKGHQPIYKVRVYEPRGNKFKVGVLGNKGAKWVEAAKGTNLFFAIYITEDGNRTYETIPLNWVIEREKQGLVPVPDRNEKGDKLLFWLSPNDLVYLPTEEERDFGRINEPIDRGRIYKMVSSSGNQCFFIPQSISNAIISTKELGSNNKAEKSWDGEMIKNICIPVKVDRLGRIIEVKYRVNE

SEQ ID NO: 305 - protein, 1508 aa, Bacteroides uniformis
MRTILGLDLGTNSIGWAVINSVIKEQTERIWIEMAGSRIIPMDAAILGDFDKGNSISQTAERTRFRGVRRLRERQLLRRERLHKVLKILGFLPEHYLKGIDFEKHTGKFLSGSEPKLPWVKDRWGKYSFLFQTAFNEMLADFAKHQPSLVFDGKKIPYDWTVYYLRKKALTEMISKEELAWILLNFNQKRGYYQLRGEEEEDNAGKSVEFYALKVLSVEATDEKKGRDIWYNVHLENGWVYRRSSNVPLDWEGRVKEFIVTTDLNPDGTPKLDKYGEVKRSFRAPKEDDWMLIKKRTEADITGTHKTIGSYIYDALLQEPQQKIIGKLVKTVERKFYKEELNFILQKQCAFHAELQDRDLYMRCIEALYPGNEVQRRNIANRDFIYLLIDDVLFYQRPLKTKKSLIANCPYEENEYVNRKTGEIKTAPLKCIAKSHPLFQEFRLWYFLSNIRVYQKEREVNGTLHLDVDVTTEFLKTEDDYVALFDWLNSRKEIDQKAFLRYPAFGLKKEINNYRWNYVEDKFYPCNETRHAILSRLEKAGIGIDFLSDEKETALWHILYSVSDKQEIEKALATFAVKNGLNESFVEVFKKFPPFKSEYGAYSAKAIKKLLPLMRCGKYWDMSLIDGTTKERIERIIAGECDESIGAKVREKAMNLSDISCFKRLPLWLACYVVYNRHSEDKEITKWETPADIDAYLAAFKQHSLRNPIVEQVITETLRVVRDIWKQVGKIDEIRIELGREMKNPADKRKRMTTQILENENANLRIKALLAEFVNPEYGVENVRPYSPSQQEILRIYEDAVLKGEEQIPEDIDVILKKFNTSKLPTKSEFLRYKLWLEQKYRSPYTGELIPLAKLFTAAYEIEHVIPQSRYFDDSFSNKVICESAVNKLKDNQLGYEFIKNHHGQKVEVGFGKTVEIFSVDSYERFVKEQYAKSGIKMKKLLMDDIPEQFIERQLNDSRYISKVVKGLLSNIVREKNDSGEYEPEAVSKNILVCTGSVTDRLKKDWGMNDVWNSIVSPRFERLNALTETQCFGHWENKDGKKVFQTAVPLEYQKGFSKKRIDHRHHAMDAIVIACATRNHVNYLNNESASRNAKISRYDLQRLLCDKSRGDGNGNYRWIIKKPWTTFTQDAREALSGIIVSLKQNLRIINKTTNIYQHFDANGTRVYEKQKIGDSWAIRKPMHKDTVFGAVNLRKVKVVRLSVALDTPSMIVNKRVKNKVLELLSYKYDKKKIEKYFKENAFLWKELDIAKVAVYYFTENTTEPLVAVRKSLDSTFNEKKIASVTDTGIQKILLNHLKSKEGKAELAFSAEGIEEMNRNLLQLNDGKGHQPIYKVRVYEPRGNKFKVGVLGNKGAKWVEAAKGTNLFFAIYITEDGNRTYETIPLNWVIEREKQGLVPVPDRNEKGDKLLFWLSPNDLVYLPTEEERDFGRINEPIDRGRIYKMVSSSGNQCFFIPQSISNAIISTKELGSNNKAEKSWDGEMIKNICIPVKVDRLGRIIEVKYRVNE

SEQ ID NO: 306 - protein, 1210 aa, Bacteroides uniformis
MRTILGLDLGTNSIGWAVINSVIKEQTERIWIEMAGSRIIPMDAAILGDFDKGNSISQTAERTRFRGVRRLRERQLLRRERLHKVLKILGFLPEHYLKGIDFEKHTGKFLSGSEPKLPWVKDRWGKYSFLFQTAFNEMLADFAKHQPSLVFDGKKIPYDWTVYYLRKKALTEMISKEELAWILLNFNQKRGYYQLRGEEEEDNAGKSVEFYALKVLSVEATDEKKGRDIWYNVHLENGWVYRRSSNVPLDWEGRVKEFIVTTDLNPDGTPKLDKYGEVKRSFRAPKEDDWMLIKKRTEADITGTHKTIGSYIYDALLQEPQQKIIGKLVKTVERKFYKEELNFILQKQCAFHAELQDRDLYMRCIEALYPGNEVQRRNIANRDFIYLLIDDVLFYQRPLKTKKSLIANCPYEENEYVNRKTGEIKTAPLKCIAKSHPLFQEFRLWYFLSNIRVYQKEREVNGTLHLDVDVTTEFLKTEDDYVALFDWLNSRKEIDQKAFLRYPAFGLKKEINNYRWNYVEDKFYPCNETRHAILSRLEKAGIGIDFLSDEKETALWHILYSVSDKQEIEKALATFAVKNGLNESFVEVFKKFPPFKSEYGAYSAKAIKKLLPLMRCGKYWDMSLIDGTTKERIERIIAGECDESIGAKVREKAMNLSDISCFKRLPLWLACYVVYNRHSEDKEITKWETPADIDAYLAAFKQHSLRNPIVEQVITETLRVVRDIWKQVGKIDEIRIELGREMKNPADKRKRMTTQILENENANLRIKALLAEFVNPEYGVENVRPYSPSQQEILRIYEDAVLKGEEQIPEDIDVILKKFNTSKLPTKSEFLRYKLWLEQKYRSPYTGELIPLAKLFTAAYEIEHVIPQSRYFDDSFSNKVICESAVNKLKDNQLGYEFIKNHHGQKVEVGFGKTVEIFSVDSYERFVKEQYAKSGIKMKKLLMDDIPEQFIERQLNDSRYISKVVKGLLSNIVREKNDSGEYEPEAVSKNILVCTGSVTDRLKKDWGMNDVWNSIVSPRFERLNALTETQCFGHWENKDGKKVFQTAVPLEYQKGFSKKRIDHRHHAMDAIVIACATRNHVNYLNNESASRNAKISRYDLQRLLCDKSRGDGNGNYRWIIKKPWTTFTQDAREALSGIIVSLKQNLRIINKTTNIYQHFDANGTRVYEKQKIGDSWAIRKPMHKDTVFGAVNLRKALIPQHYNLTLFISS

SEQ ID NO: 307 - protein, 1504 aa, Bacteroides vulgatus
MKNIVGLDLGTNSIGWAVVNGSVNDDGSEQLVKIQASGSRIIPMDAAMIGDFNKGNSISQTAERTRLRGVRRLSERYLLRRERLHRILDILGFLPFHFAQDLDRHGKIVKGKEPKLAWRKNEAGQFEFIFQDSFKEMLEDFKLNHPNLITDDKKVPYDWTIYYLRKKGLTSKISKEELAWILLNFNQKRGYYQLRGEEEEENKNKLVEFYALKVVAVEDSGEKKGKDIWYNVHLENGWVYRRTSNMPLDWVGKTKEFIVTTDLEKDGTPKKDKEGNVKRSFRAPKEDDWSLLKKKTEADIDQTHKTVGVYIYDTLLGNPSQKIRGRLVRTIERKYYKEELKQILEKQKEFHLELQDRALYAACIEELYPINEAHRNNVGNRDFTYLFLEDILFYQRPLKSKKSLIDNCPYEENQGLDKETGEIKSFPVKCIAKSHPLFQEFRLWQFIVNLRIYRKDLAQDVDVTNELLKTEEDYVALFDWLNGKKEIDQKAFLKYPVFGLKKEIENYRWNYVQDKPYPCNETRSLMLARLEKCDISIEFLTKENEEALWHILYSVEDKNEIVKALQKFADKHDLNASFVDVFQKFPPFKKEYGSYSAKAIKKLLPLMRMGKYWSENSIDKGTRERIDKIITGEYDEKIENRVREKAIHLADVSDFKGLPLWLVCYIVYGRHSEAKEITQWKSPADIDSYLRSFKQHSLRNPIVEQIIIETLRVVRDIWKQVGNIDEIHVELGREMKNPADKRKKMTQQMSENENTNLRIKYLLTEFLNPEYEVENVRPYSPSQQDILRIYEEGVLNSVSDLPEEISDILKKFTETDLKKRPSRSEILRYKLWLEQKYRSPYTGEVIPLGKLFTPAYEIEHVIPQSCYFDDSFSNKVICEAEVNKLKSNLLGHEFIVKHHGEIVELPFGKKVRIFTVDEYEQFVKDNYSRTRSKMKKLLMDDIPEEFVTRQLNDSRYISKVVKSLLSNIVREKGEEEAISKNVIPCTGGVTDRLKKDWGINEVWNKIILPRFQRLNELTGTNKFTTKNVGIQEIPTMPLELQKGFNKKRIDHRHHAMDAIIIACANRNIINYLNNESATAKAELSRYDLQKMLCDKAKTDNNGNYKWVIRKPWASFTQDTYLALENIIVSFKQNLRVINKATNRFLHYNEEGKKIFVKQGKGDNWAIRKSMHKDTVFGEVNLRRIKTVALNEAMKNPQSIVVKDFKRKLLELWNLGFDAKRIKKYFEDNRETWSDINLSKIEVYYFSKDTKDRFFATRKPLDTSFDRKKIENNITDTGIQKILLRHLELKDNNPDIAFSPDGIDEMNRNIIQLNNGKYHQPIIKIRWYEQADKFAVGQTGNKFSKFVEAAKGTNLFFAVYESNILDKKTNTIIKKRNYATIPLNVAIERQKQGLPVAPEDENGNDPIFVLSPNDLVYLPTDDELANGIIAQPLDRGRIYKMVSCTGNEGHFIPARIANPILQTIELGSNNKAQKAWTDEMIKEICMPIKVDRLGNVLESSSSYKK

SEQ ID NO: 308 - protein, 1153 aa, Barnesiella intestinihominis
MKNILGLDLGLSSIGWSVIRENSEEQELVAMGSRVVSLTAAELSSFTQGNGVSINSQRTQKRTQRKGYDRYQLRRTLLRNKLDTLGMLPDDSLSYLPKLQLWGLRAKAVTQRIELNELGRVLLHLNQKRGYKSIKSDFSGDKKITDYVKTVKTRYDELKEMRLTIGELFFRRLTENAFFRCKEQVYPRQAYVEEFDCIMNCQRKFYPDILTDETIRCIRDEIIYYQRPLKSCKYLVSRCEFEKRFYLNAAGKKTEAGPKVSPRTSPLFQVCRLWESINNIVVKDRRNEIVFISAEQRAALFDFLNTHEKLKGSDLLKLLGLSKTYGYRLGEQFKTGIQGNKTRVEIERALGNYPDKKRLLQFNLQEESSSMVNTETGEIIPMISLSFEQEPLYRLWHVLYSIDDREQLQSVLRQKFGIDDDEVLERLSAIDLVKAGFGNKSSKAIRRILPFLQLGMNYAEACEAAGYNHSNNYTKAENEARALLDRLPAIKKNELRQPVVEKILNQMVNVVNALMEKYGRFDEIRVELARELKQSKEERSNTYKSINKNQRENEQIAKRIVEYGVPTRSRIQKYKMWEESKHCCIYCGQPVDVGDFLRGFDVEVEHIIPKSLYFDDSFANKVCSCRSCNKEKNNRTAYDYMKSKGEKALSDYVERVNTMYTNNQISKTKWQNLLTPVDKISIDFIDRQLRESQYIARKAKEILTSICYNVTATSGSVTSFLRHVWGWDTVLHDLNFDRYKKVGLTEVIEVNHRGSVIRREQIKDWSKRFDHRHHAIDALTIACTKQAYIQRLNNLRAEEGPDFNKMSLERYIQSQPHFSVAQVREAVDRILVSFRAGKRAVTPGKRYIRKNRKRISVQSVLIPRGALSEESVYGVIHVWEKDEQGHVIQKQRAVMKYPITSINREMLDKEKVVDKRIHRILSGRLAQYNDNPKEAFAKPVYIDKECRIPIRTVRCFAKPAINTLVPLKKDDKGNPVAWVNPGNNHHVAIYRDEDGKYKERTVTFWEAVDRCRVGIPAIVTQPDTIWDNILQRNDISENVLESLPDVKWQFVLSLQQNEMFILGMNEEDYRYAMDQQDYALLNKYLYRVQKLSKSDYSFRYHTETSVEDKYDGKPNLKLSMQMGKLKRVSIKSLLGLNPHKVHISVLGEIKEIS

SEQ ID NO: 309 - protein, 1352 aa, Belliella baltica
MKKILGLDLGTTSIGWAFIKEPEKDVVGSEIVDMGVRIVPLSSDEENDFAKGNTISINADRTLKRGARRNLQRFKQRRNALLEIFKEKKLISTNFKYAEDGPSSTFSTLNLRAKAAKEKIELQDLVKVLLQINKKRGYKSSRKAKSEEDDGSAIDSMGIAKELYENDLTPGQWVYEALQKGRKNVPDFYRSDLQEEFKKIVNYQSEFFPDIFNASFVEDWMGKASTPTKQYFNKKGVQLAENKGKREERRLQEYKWRAEAVNFKIDLSEIALILSQINSQISNSSGYLGAISDRSKELYFKNLTVGQYLYQQIKKNPHTRLKGQVFYRQDYLDEFERIWSVQSSFYPQLNDALKREVRDITIFFQRRLKSQKHLISNCEFEDHHKVVPKSHPVFQEFRIWQNLNNLLLIKKDNLNEKFDLELESKIALANELAFKRELNVKDALKILGLKPNEWEFNFTKIEGNRTNQAFFDAFAKIIELEDGEPIDLGDLKADDILDQFSEAFLRIGIDTELLQVNSDIEGAEYEKQSYIQFWHLLYSSEDDQKLKLNLIRKFGFKPEHAKILASISLQDDHASLSSRAIKKILPHLQSGLIYDKACTYAGYNHSSSFTKDENEKRELRAELELLKKNSLRNPVVEKILNQMINVVNAILKDPELGRPDEIRVEMARELKANAEQRKNMTSNIASATRDHDKYREILKSEFGLKRVTKNDLLRYKLWLETDGISLYTGKPIEASKLFSKEYDIEHIIPKARLFDDSFSNKTICERQLNIDKANVTAFSFLQNKLSADEFEQYQSRVKSLYGKLSKAKIQKLLMANDKIPEDFIARQLQETRYISKKAKEILFEISRRVSVTTGTITDKLREDWGLVEIMKELNWEKYDKLGLTYTIEGKHGERLNKIKDWSKRNDHRHHAMDALTVALTKPAYIQYLNNLNAKGLNNKKGTEVFAIEQKYLKRENGKLCFIPPIENIRSEAKKHLSRILVSYKAKNKVVTINKNKTKSKAGLNEQIALTPRGQLHKETVYGKSFHYSTKFEKIGASFNVQKINTVAKKEEREALLKRLAENGNDPKKAFTGKNTLNKMPIYLDLGKNIKLSEKVKTVVLEQNYTIRKNIDPDLKVDKVIDVGIKRILESRLEEFGGNAKLAFSNLEENPIWLNKEKGISIKRVKISGVSNVESLHVKKDHFGEPILDQEGNEIPVDFVSTGNNHHVAIYEDENGNLQEEVVSFFEAVVRQNQGLPIIKKNHTLGWKFLFTLKQNEYFVFPSDDFVPADVDLMDEQNYHLISPNLFRVQKIARKNYVFNNHLETKAVDNDLLKSKKELSKITYHFYQTPEHLRGIIKIRINHLGKIIQIGEY

SEQ ID NO: 310 - protein, 1415 aa, Bergeyella zoohelcum
MKHILGLDLGTNSIGWALIERNIEEKYGKIIGMGSRIVPMGAELSKFEQGQAQTKNADRRTNRGARRLNKRYKQRRNKLIYILQKLDMLPSQIKLKEDFSDPNKIDKITILPISKKQEQLTAFDLVSLRVKALTEKVGLEDLGKIIYKYNQLRGYAGGSLEPEKEDIFDEEQSKDKKNKSFIAFSKIVFLGEPQEEIFKNKKLNRRAIIVETEEGNFEGSTFLENIKVGDSLELLINISASKSGDTITIKLPNKTNWRKKMENIENQLKEKSKEMGREFYISEFLLELLKENRWAKIRNNTILRARYESEFEAIWNEQVKHYPFLENLDKKTLIEIVSFIFPGEKESQKKYRELGLEKGLKYIIKNQVVFYQRELKDQSHLISDCRYEPNEKAIAKSHPVFQEYKVWEQINKLIVNTKIEAGTNRKGEKKYKYIDRPIPTALKEWIFEELQNKKEITFSAIFKKLKAEFDLREGIDFLNGMSPKDKLKGNETKLQLQKSLGELWDVLGLDSINRQIELWNILYNEKGNEYDLTSDRTSKVLEFINKYGNNIVDDNAEETAIRISKIKFARAYSSLSLKAVERILPLVRAGKYFNNDFSQQLQSKILKLLNENVEDPFAKAAQTYLDNNQSVLSEGGVGNSIATILVYDKHTAKEYSHDELYKSYKEINLLKQGDLRNPLVEQIINEALVLIRDIWKNYGIKPNEIRVELARDLKNSAKERATIHKRNKDNQTINNKIKETLVKNKKELSLANIEKVKLWEAQRHLSPYTGQPIPLSDLFDKEKYDVDHIIPISRYFDDSFTNKVISEKSVNQEKANRTAMEYFEVGSLKYSIFTKEQFIAHVNEYFSGVKRKNLLATSIPEDPVQRQIKDTQYIAIRVKEELNKIVGNENVKTTTGSITDYLRNHWGLTDKFKLLLKERYEALLESEKFLEAEYDNYKKDFDSRKKEYEEKEVLFEEQELTREEFIKEYKENYIRYKKNKLIIKGWSKRIDHRHHAIDALIVACTEPAHIKRLNDLNKVLQDWLVEHKSEFMPNFEGSNSELLEEILSLPENERTEIFTQIEKFRAIEMPWKGFPEQVEQKLKEIIISHKPKDKLLLQYNKAGDRQIKLRGQLHEGTLYGISQGKEAYRIPLTKFGGSKFATEKNIQKIVSPFLSGFIANHLKEYNNKKEEAFSAEGIMDLNNKLAQYRNEKGELKPHTPISTVKIYYKDPSKNKKKKDEEDLSLQKLDREKAFNEKLYVKTGDNYLFAVLEGEIKTKKTSQIKRLYDIISFFDATNFLKEEFRNAPDKKTFDKDLLFRQYFEERNKAKLLFTLKQGDFVYLPNENEEVILDKESPLYNQYWGDLKERGKNIYVVQKFSKKQIYFIKHTIADIIKKDVEFGSQNCYETVEGRSIKENCFKLEIDRLGNIVKVIKR

SEQ ID NO: 311 - protein, 1430 aa, Bergeyella zoohelcum
MKHILGLDLGTNSIGWAVVKEAQNDNEQSEIVDVGVRVNPLTTDEKTNFEKGKPISTNADRTLKRSARRNLQRYKLRRKELIELLKEHQLISTDTILTENGKGTTFQTLELRAKSAKEKISLEELARVFLTINKKRGYKSSRKAKNEDEGQLIDGMEIAKRLYEENLTTGQLSLQLLKEGKKSLPDYYRSDLQFELDKVWNFQKQFHSDILTDEFYAQLKGKGQRATSALFLAKYQIYTAENKGSREDKKLQAYQWRVDALSKELTREQLAFVITEINNNLNNSSGYLGAISDRSKELYFNNETVGEYLWKQIAANPHTSLKNQVFYRQDYLDEFEQIWKTQSAFYPEILTDELKKELRDVVIFYQRKLKSQKSLVSFCEFENKEIEIKKEDGTSTKKVIGLKVAPKSSPLFQEFKIWQNLNNVLIRKKGSKTKKVAKNQQAVLFEEEKTISELDLEAKQALFNELNLKGNLKADYCLEILGYSPKEWEMNYSVLEGNRTNKALYEAYLKITDLEGYDAKNHLKVKLNKDEVELDDLKVPASEIKDMVQAIFKEAGINTDILHFNAELDGKDFENQASYQLWHLLYSYEGDDSKSGNELLYKLLETKFGFKKEYAQILANVSLSDDYGSLSTKAMRKIHPYIKENKFSTACELAGYRHSKHSLTKEENDNRVLKDSLEVLKKNSLRQPVVEKILNQMINLVNALLKKYRTENPNFKFDEIRIELARELKKNAEERANMTANINKAKTEHEKIIKILKNEFGLPNPTRNDIIRYRLYEELKANGYKDLYTNIKIPQEKLFTKEIDIEHIIPKSRVFDDSFSNKTLSFRKTNLDKGERTAFDYMESKFGADKLEEYVARVEDLYKNNIISKAKYQKLLKKESEIGDGFVERDLRETQYIAKKAKEILLQITPNVLSTSGGITDRLREDWDLINVMKELNLPKYRALGLTQMEDRKYGQQVEVITDWTKRNDHRHHAMDALTVAFTKHNHIQYLNYLNARKNEKHKEHSNIMGIQQLETIKVTDKNGNEKRVFKAPMPNFRQVTKAFLENILISHKAKNKVVTKNKNKVAGSNKVQEVLTPRGQLHKETVYGKYQYYVQKEEKIGAKFDLETIKKVANPLYQSLLKKRLEENGGDPKKAFTGKNSLAKNPIYLDDTQTEQLPEKVKLVWLENSFSIRKDITPENFKDEKLIDKILDEGVKRILKERLQSFGNDAKKAFSDLDKNPIWLNKEKGITIKRVTISGVANAEPLHTKKDHLGKEILDKEGKPIPVDFISTGSNHHVAVYRDEKGNLQEKVVSVFEAVVRANQGLPIIDKTYNQHLGWEFLFTMKQNEMFVFPNESTGFNPNDIDLLDPKNKRIISPNLFRVQKFSKLQYGNSFVREFVFRHHLETTVEDRKELQGITYKQMKNSTFFNDIIKVRINHLGDIVSIGEY

SEQ ID NO: 312 - protein, 1281 aa, Bifidobacterium bifidum
MEDDSQHDIREIYLAIHHMVKYRGNFLVEGTLESSNAFKEDELLKLLGRITRYEMSEGEQNSDIEQDDENKLVAPANGQLADALCATRGSRSMRVDNALEALSAVNDLSREQRAIVKAIFAGLEGNKLDLAKIFVSKEFSSENKKILGIYFNKSDYEEKCVQIVDSGLLDDEEREFLDRMQGQYNAIALKQLLGRSTSVSDSKCASYDAHRANWNLIKLQLRTKENEKDINENYGILVGWKIDSGQRKSVRGESAYENMRKKANVFFKKMIETSDLSETDKNRLIHDIEEDKLFPIQRDSDNGVIPHQLHQNELKQIIKKQGKYYPFLLDAFEKDGKQINKIEGLLAFRVPYFVGPLVVPEDLQKSDNSENHWMVRKKKGEITPWNFDEMVDKDASGRKFIERLVGTDSYLLGEPTLPKNSLLYQEYEVLNELNNVRLSVRTGNHWNDKRRMRLGREEKTLLCQRLFMKGQTVTKRTAENLLRKEYGRTYELSGLSDESKFTSSLSTYGKMCRIFGEKYVNEHRDLMEKIVELQTVFEDKETLLHQLRQLEGISEADCALLVNTHYTGWGRLSRKLLTTKAGECKISDDFAPRKHSIIEIMRAEDRNLMEIITDKQLGFSDWIEQENLGAENGSSLMEVVDDLRVSPKVKRGIIQSIRLIDDISKAVGKRPSRIFLELADDIQPSGRTISRKSRLQDLYRNANLGKEFKGIADELNACSDKDLQDDRLFLYYTQLGKDMYTGEELDLDRLSSAYDIDHIIPQAVTQNDSIDNRVLVARAENARKTDSFTYMPQIADRMRNFWQILLDNGLISRVKFERLTRQNEFSEREKERFVQRSLVETRQIMKNVATLMRQRYGNSAAVIGLNAELTKEMHRYLGFSHKNRDINDYHHAQDALCVGIAGQFAANRGFFADGEVSDGAQNSYNQYLRDYLRGYREKLSAEDRKQGRAFGFIVGSMRSQDEQKRVNPRTGEVVWSEEDKDYLRKVMNYRKMLVTQKVGDDFGALYDETRYAATDPKGIKGIPFDGAKQDTSLYGGFSSAKPAYAVLIESKGKTRLVNVTMQEYSLLGDRPSDDELRKVLAKKKSEYAKANILLRHVPKMQLIRYGGGLMVIKSAGELNNAQQLWLPYEEYCYFDDLSQGKGSLEKDDLKKLLDSILGSVQCLYPWHRFTEEELADLHVAFDKLPEDEKKNVITGIVSALHADAKTANLSIVGMTGSWRRMNNKSGYTFSDEDEFIFQSPSGLFEKRVTVGELKRKAKKEVNSKYRTNEKRLPTLSGASQP

SEQ ID NO: 313 - protein, 1121 aa, Bifidobacterium dentium
MSVGLAAIEVDETGFPIRILNIQSVIHDGGIDPQLGKKKSISRKAISGVARRTRRMRRRKVVRLRQLDATLESLGFPIVEPDSLDTWEIWLTRAKLASSYIQDDETRKEDVSIALRHIARHRGWRNPYSNVESLFVDVAPSEQYEELRRKAEEKLGTSLSGNPTSAEIVECILKRQVGEVQLRTRSRKGVNGNAVEKEGLLPTKLMQSDNAAEIRRIFKVQRIDDETGRKLLRAVFKACSPKGSVERRVGRDALAPGLPRALKASLAFQEYRIANVLTNLVISEDGTKRKLTIAEKQRVFGFLSSNETDDITWIDVAEKLGLERRQIQGVGCLTADGEERISSTPPRNITALHIHSAKPVIREKLVAWWKAASPTVRETMVELLSNTVDIDRVREDMDYSSAVAFIDSLGDEELTALDSVDLLSGRAAYSRQTLKQLTERMLNTDDDLHEARKAVFGVDDNWKPPVDAISTSVGNPAVDRVLKIVNRYLLACQKRWRNPQSVQIEHVRESFSSVAKAKETERVQGERARYRNDLRRELCEQEGLNKIRESDIRRWESVQRQNGTCLYCGSPITFRTCEMDHIVPRKGVGSTNTRVNLAAACAACNKLKSNTAFSVWARTEGAANRKVSQRDAIERVKTFIFNKSVPPREQRAFKQAVISRLRQAESDPAIDNRSIESVAWMADELHRRIEAYFNQDADVSGNTPATQVWVFQGRVTALARKASGIEGRIHFAGEWKKTRLDRRHHAVDAAVIAMMNHSAAQTLVERDSLRLSQWITRKPETWKNYPFSEGQKKTRFKEWLDCMNALLDLLNDALDSDRVPVTRCQRMSLGNSQAHAATIRKMKRVELFSPMDADLIRRASTPALYCALTRLPEYSPEKGLPENRGREIVLNGRHIRSTETVDFFASGAAQLMVRNGSAEIGDSIHHMRIYRYRKTGAKSQEYVYGMIRVFQIDLLHASSENLFAVQLPSQSVSVRYGDKNVVQAIQEGRAEYLGHIVPNDEILISYEGVRMKDSEKIGAYANDFSGTASELAQRRHWVVVGSDVSKLALRPSYLSEEGLENSGSESERLSKQTRKVIEGKGWVVAVNILAKYHPVVIRRNALGEPRFRTNSGMPVSWRWDR

SEQ ID NO: 314 - protein, 354 aa, Bifidobacterium longum
AKQYVNSASIDDAEAETMKTTVSVFQGRVTASARRAAGIEGKIHFIGQQSKTRLDRRHHAVDASVIAMMNTAAAQTLMERESLRESQRLIGLMPGERSWKEYPYEGTSRYESFHLWLDNMDVLLELLNDALDNDRIAVMQSQRYVLGNSIAHDATIHPLEKVPLGSAMSADLIRRASTPALWCALTRLPDYDEKEGLPEDSHREIRVHDTRYSADDEMGFFASQAAQIAVQEGSADIGSAIHHARVYRCWKTNAKGVRKYFYGMIRVFQTDLLRACHDDLFTVPLPPQSISMRYGEPRVVQALQSGNAQYLGSLVVGDEIEMDFSSLDVDGQIGEYLQFFSQFSGGNLAWKHWV

SEQ ID NO: 315 - protein, 1124 aa, Bifidobacterium longum
LTGHSGHTFWPTSSSPPIQLEQEKRPLPQRNTSQNGHTFWPITRERCFMRGKRYRIGIDVGLNSVGLAAVEVSDENSPVRLLNAQSVIHDGGVDPQKNKEAITRKNMSGVARRTRRMRRRKRERLHKLDMLLGKFGYPVIEPESLDKPFEEWHVRAELATRYIEDDELRRESISIALRHMARHRGWRNPYRQVDSLISDNPYSKQYGELKEKAKAYNDDATAAEEESTPAQLVVAMLDAGYAEAPRLRWRTGSKKPDAEGYLPVRLMQEDNANELKQIFRVQRVPADEWKPLFRSVFYAVSPKGSAEQRVGQDPLAPEQARALKASLAFQEYRIANVITNLRIKDASAELRKLTVDEKQSIYDQLVSPSSEDITWSDLCDFLGFKRSQLKGVGSLTEDGEERISSRPPRLTSVQRIYESDNKIRKPLVAWWKSASDNEHEAMIRLLSNTVDIDKVREDVAYASAIEFIDGLDDDALTKLDSVDLPSGRAAYSVETLQKLTRQMLTTDDDLHEARKTLFNVTDSWRPPADPIGEPLGNPSVDRVLKNVNRYLMNCQQRWGNPVSVNIEHVRSSFSSVAFARKDKREYEKNNEKRSIFRSSLSEQLRADEQMEKVRESDLRRLEAIQRQNGQCLYCGRTITFRTCEMDHIVPRKGVGSTNTRTNFAAVCAECNRMKSNTPFAIWARSEDAQTRGVSLAEAKKRVTMFTFNPKSYAPREVKAFKQAVIARLQQTEDDAAIDNRSIESVAWMADELHRRIDWYFNAKQYVNSASIDDAEAETMKTTVSVFQGRVTASARRAAGIEGKIHFIGQQSKTRLDRRHHAVDASVIAMMNTAAAQTLMERESLRESQRLIGLMPGERSWKEYPYEGTSRYESFHLWLDNMDVLLELLNDALDNDRIAVMQSQRYVLGNSIAHDATIHPLEKVPLGSAMSADLIRRASTPALWCALTRLPDYDEKEGLPEDSHREIRVHDTRYSADDEMGFFASQAAQIAVQEGSADIGSAIHHARVYRCWKTNAKGVRKYFYGMIRVFQTDLLRACHDDLFTVPLPPQSISMRYGEPRVVQALQSGNAQYLGSLVVGDEIEMDFPVSMLMVRLASIYNSSRSLVEGTLHGNIGLLMDSLTRRS

SEQ ID NO: 316 - protein, 166 aa, Bifidobacterium longum
MGLAAVEVSDENSPVRLLNAQSVIHDGGVDPQKNKEAITRKNMSGVARRTRRMRRRKRERLHKLDMLLGKFGYPVIEPESLDKPFEEWHVRAELATRYIEDDELRRESISIALRHMARHRGWRNPYRQVDSLISDNPYSKQYGELKEKAKAYNDDATAAEEESTPA

SEQ ID NO: 317 - protein, 1138 aa, Bifidobacterium longum
MNSVGLAAVEVSDENSPVRLLNAQSVIHDGGVDPQKNKEAITRKNMSGVARRTRRMRRRKRERLHKLDMLLGKFGYPVIEPESLDKPFEEWHVRAELATRYIEDDELRRESISIALRHMARHRGWRNPYRQVDSLISDNPYSKQYGELKEKAKAYNDDATAAEEESTPAQLVVAMLDAGYAEAPRLRWRTGSKKPDAEGYLPVRLMQEDNANELKQIFRVQRVPADEWKPLFRSVFYAVSPKGSAEQRVGQDPLAPEQARALKASLAFQEYRIANVITNLRIKDASAELRKLTVDEKQSIYDQLVSPSSEDITWSDLCDFLGFKRSQLKGVGSLTEDGEERISSRPPRLTSVQRIYESDNKIRKPLVAWWKSASDNEHEAMIRLLSNTVDIDKVREDVAYASAIEFIDGLDDDALTKLDSVDLPSGRAAYSVETLQKLTRQMLTTDDDLHEARKTLFNVTDSWRPPADPIGEPLGNPSVDRVLKNVNRYLMNCQQRWGNPVSVNIEHVRSSFSSVAFARKDKREYEKNNEKRSIFRSSLSEQLRADEQMEKVRESDLRRLEAIQRQNGQCLYCGRTITFRTCEMDHIVPRKGVGSTNTRTNFAAVCAECNRMKSNTPFAIWARSEDAQTRGVSLAEAKKRVTMFTFNPKSYAPREVKAFKQAVIARLQQTEDDAAIDNRSIESVAWMADELHRRIDWYFNAKQYVNSASIDDAEAETMKTTVSVFQGRVTASARRAAGIEGKIHFIGQQSKTRLDRRHHAVDASVIAMMNTAAAQTLMERESLRESQRLIGLMPGERSWKEYPYEGTSRYESFHLWLDNMDVLLELLNDALDNDRIAVMQSQRYVLGNSIAHDATIHPLEKVPLGSAMSADLIRRASTPALWCALTRLPDYDEKEGLPEDSHREIRVHDTRYSADDEMGFFASQAAQIAVQEGSADIGSAIHHARVYRCWKTNAKGVRKYFYGMIRVFQTDLLRACHDDLFTVPLPPQSISMRYGEPRVVQALQSGNAQYLGSLVVGDEIEMDFSSLDVDGQIGEYLQFFSQFSGGNLAWKHWVVDGFFNQTQLRIRPRYLAAEGLAKAFSDDVVPDGVQKIVTKQGWLPPVNTASKTAVRIVRRNAFGEPRLSSAHHMPCSWQWRHE

SEQ ID NO: 318 - protein, 182 aa, Bifidobacterium longum
MRGKRYRIGIDVGLNSVGLAAVEVSDENSPVRLLNAQSVIHDGGVDPQKNKEAITRKNMSGVARRTRRMRRRKRERLHKLDMLLGKFGYPVIEPESLDKPFEEWHVRAELATRYIEDDELRRESISIALRHMARHRGWRNPYRQVDSLISDNPYSKQYGELKEKAKAYNDDATAAEEESTPA

SEQ ID NO: 319 - protein, 441 aa, Bifidobacterium longum
MVAMLDAGYAEAPRLRWRTGSKKPDAEGYLPVRLMQEDNANELKQIFRVQRVPADEWKPLFRSVFYAVSPKGSAEQRVGQDPLAPEQARALKASLAFQEYRIANVITNLRIKDASAELRKLTVDEKQSIYDQLVSPSSEDITWSDLCDFLGFKRSQLKGVGSLTEDGEERISSRPPRLTSVQRIYESDNKIRKPLVAWWKSASDNEHEAMIRLLSNTVDIDKVREDVAYASAIEFIDGLDDDALTKLDSVDLPSGRAAYSVETLQKLTRQMLTTDDDLHEARKTLFNVTDSWRPPADPIGEPLGNPSVDRVLKNVNRYLMNCQQRWGNPVSVNIEHVRSSFSSVAFARKDKREYEKNNEKRSIFRSSLSEQLRADEQMEKVRESDLRRLEAIQRQNGQCLYCGRTITFRTCEMDHIVPRKGVGSTNTRTNFAAVCAECNRM

SEQ ID NO: 320 - protein, 967 aa, Bifidobacterium longum
MVAMLDAGYAEAPRLRWRTGSKKPDAEGYLPVRLMQEDNANELKQIFRVQRVPADEWKPLFRSVFYAVSPKGSAEQRVGQDPLAPEQARALKASLAFQEYRIANVITNLRIKDASAELRKLTVDEKQSIYDQLVSPSSEDITWSDLCDFLGFKRSQLKGVGSLTEDGEERISSRPPRLTSVQRIYESDNKIRKPLVAWWKSASDNEHEAMIRLLSNTVDIDKVREDVAYASAIEFIDGLDDDALTKLDSVDLPSGRAAYSVETLQKLTRQMLTTDDDLHEARKTLFNVTDSWRPPADPIGEPLGNPSVDRVLKNVNRYLMNCQQRWGNPVSVNIEHVRSSFSSVAFARKDKREYEKNNEKRSIFRSSLSEQLRADEQMEKVRESDLRRLEAIQRQNGQCLYCGRTITFRTCEMDHIVPRKGVGSTNTRTNFAAVCAECNRMKSNTPFAIWARSEDAQTRGVSLAEAKKRVTMFTFNPKSYAPREVKAFKQAVIARLQQTEDDAAIDNRSIESVAWMADELHRRIDWYFNAKQYVNSASIDDAEAETMKTTVSVFQGRVTASARRAAGIEGKIHFIGQQSKTRLDRRHHAVDASVIAMMNTAAAQTLMERESLRESQRLIGLMPGERSWKEYPYEGTSRYESFHLWLDNMDVLLELLNDALDNDRIAVMQSQRYVLGNSIAHDATIHPLEKVPLGSAMSADLIRRASTPALWCALTRLPDYDEKEGLPEDSHREIRVHDTRYSADDEMGFFASQAAQIAVQEGSADIGSAIHHARVYRCWKTNAKGVRKYFYGMIRVFQTDLLRACHDDLFTVPLPPQSISMRYGEPRVVQALQSGNAQYLGSLVVGDEIEMDFSSLDVDGQIGEYLQFFSQFSGGNLAWKHWVVDGFFNQTQLRIRPRYLAAEGLAKAFSDDVVPDGVQKIVTKQGWLPPVNTASKTAVRIVRRNAFGEPRLSSAHHMPCSWQWRHE

SEQ ID NO: 321 - protein, 1151 aa, Bifidobacterium sp.
MRGKRYRIGIDVGLNSVGLAAVEVSDENSPVRLLNAQSVIHDGGVDPQKNKEAITRKNMSGVARRTRRMRRRKRERLHKLDMLLGKFGYPVIEPESLDKPFEEWHVRAELATRYIEDDELRRESISIALRHMARHRGWRNPYRQVDSLISDNPYSKQYGELKEKAKAYNDDATAAEEESTPAQLVVAMLDAGYAEAPRLRWRTGSKKPDAEGYLPVRLMQEDNANELKQIFRVQRVPADEWKPLFRSVFYAVSPKGSAEQRVGQDPLAPEQARALKASLAFQEYRIANVITNLRIKDASAELRKLTVDEKQSIYDQLVSPSSEDITWSDLCDFLGFKRSQLKGVGSLTEDGEERISSRPPRLTSVQRIYESDNKIRKPLVAWWKSASDNEHEAMIRLLSNTVDIDKVREDVAYASAIEFIDGLDDDALTKLDSVDLPSGRAAYSVETLQKLTRQMLTTDDDLHEARKTLFNVTDSWRPPADPIGEPLGNPSVDRVLKNVNRYLMNCQQRWGNPVSVNIEHVRSSFSSVAFARKDKREYEKNNEKRSIFRSSLSEQLRADEQMEKVRESDLRRLEAIQRQNGQCLYCGRTITFRTCEMDHIVPRKGVGSTNTRTNFAAVCAECNRMKSNTPFAIWARSEDAQTRGVSLAEAKKRVTMFTFNPKSYAPREVKAFKQAVIARLQQTEDDAAIDNRSIESVAWMADELHRRIDWYFNAKQYVNSASIDDAEAETMKTTVSVFQGRVTASARRAAGIEGKIHFIGQQSKTRLDRRHHAVDASVIAMMNTAAAQTLMERESLRESQRLIGLMPGERSWKEYPYEGTSRYESFHLWLDNMDVLLELLNDALDNDRIAVMQSQRYVLGNSIAHDATIHPLEKVPLGSAMSADLIRRASTPALWCALTRLPDYDEKEGLPEDSHREIRVHDTRYSADDEMGFFASQAAQIAVQEGSADIGSAIHHARVYRCWKTNAKGVRKYFYGMIRVFQTDLLRACHDDLFTVPLPPQSISMRYGEPRVVQALQSGNAQYLGSLVVGDEIEMDFSSLDVDGQIGEYLQFFSQFSGGNLAWKHWVVDGFFNQTQLRIRPRYLAAEGLAKAFSDDVVPDGVQKIVTKQGWLPPVNTASKTAVRIVRRNAFGEPRLSSAHHMPCSWQWRHE

SEQ ID NO: 322 - protein, 1092 aa, Brevibacillus laterosporus
MAYTMGIDVGIASCGWAIVDLERQRIIDIGVRTFEKAENPKNGEALAVPRREARSSRRRLRRKKHRIERLKYMFVRNGLAVDIQHLEQTLRSQNEIDVWQLRVDGLDRMLTQKEWLRVLIHLAQRRGFQSNRKTDGSSEDGQVLVNVTENDRLMEEKDYRTVAEMMVKDEKFSDHKRNKNGNYHGVVSRASLLVEIHTLFESQRQHHNFLASKDFELEYINIWSSQRPVATKDQIEKMIGTCTFLPKEKRAPKASWHFQYFMLLQTINHIRITNAQGTRPLNKEEIEQVVNMALTKSKVSYHDIRKVLDLSEEYQFVGLDYGKEDEKKKVESKETIIKLDDYHKLNKIFNEVELAKGETWEAVDYDTVAYALTFFKDDEDIRDYLQNKYKDSKNRLVKNVANKEYTNELIEKVSTLSFRKVGHLSLKALRKIIPFLEQGMTYDKACQAAGFNFQGISKKKRSVVLPVIDQISNPVVNRALTQTRKVINALIKKYGSPETIHIETARELSKRFDERKNITKDYKENRDKNERAKKHLSELGIINPTGLDIVKYKLWCEQQGRCMYSNQPISFERLRESGYTEVDHIIPYSRSMNDSYNNRVLVMTRENREKSNQTPYEYMGNDTQRWDEFEQRVTTNPQIKKEKRQNLLLKGFTNRRELEMLERNLNDTRHITKYLSHFISTNLEFSPSDKKKKVVNTSGRITSHLRSRWGLEKNREQNDLHHAMDAVVIAVTSDSFIQQVTNYYKRKERRELNGDDKFPLPWKFFREEVIARLSPNPKEQIEALPNHFYSEDELADLQPIFVSRMPKRSITGEAHQAQFRRVVGKTKEGKNITAKKTALVDISYDKNGDFNMYGRETDPATYEAIKERYLEFGGNAKKAFSTDLHKPKKDGTKGPLIKSVRIMENKTLVHPVNKGKGVVYNSSIVRTDVFQRKEKYYLLPVYVTDVTKGKLPNKVIAAKKGYDDWIEVDDSFTFLYSLYPNDLIFIRQNPKKKISLKKRIESHSISDSKEVQEILTYYKGVDSSTAAIEFITHDGSYYAKGVGVQNLDCFEKYQVDILGNYSKVKGEKRLELETSDNNHKGKDVNSIKSTSR

SEQ ID NO: 323 - protein, 103 aa, Butyrivibrio fibrisolvens
MISVGQSRKDLEDLGYEFKLSFYKEDIIEYEKNGDILVERFLSRTMPQVRNYIETKPIDRPKYDKRNPVGLSKTSSIRKITMDILGNRFYVDKMSFNNVVGTQ

SEQ ID NO: 324 - protein, 177 aa, Butyrivibrio fibrisolvens
MLIAFSQMGYDAYHELTNKYIDFETGEIIDKEGFNELLNNDLVYKNTMYESKWLKIKGNIEKAAEKNKYWYQVNKKCNRGLCNQTVYGTRESDGDVYKISKIDIRTDDGFKKFKNIVDKGNESVFLMYENDPKTFELIMDIYKNYSDSKNPFVQYEKETGDIIRKYSKKITGQRFLN

SEQ ID NO: 325 - protein, 1442 aa, Caenispirillum salinarum
MPVLSPLSPNAAQGRRRWSLALDIGEGSIGWAVAEVDAEGRVLQLTGTGVTLFPSAWSNENGTYVAHGAADRAVRGQQQRHDSRRRRLAGLARLCAPVLERSPEDLKDLTRTPPKADPRAIFFLRADAARRPLDGPELFRVLHHMAAHRGIRLAELQEVDPPPESDADDAAPAATEDEDGTRRAAADERAFRRLMAEHMHRHGTQPTCGEIMAGRLRETPAGAQPVTRARDGLRVGGGVAVPTRALIEQEFDAIRAIQAPRHPDLPWDSLRRLVLDQAPIAVPPATPCLFLEELRRRGETFQGRTITREAIDRGLTVDPLIQALRIRETVGNLRLHERITEPDGRQRYVPRAMPELGLSHGELTAPERDTLVRALMHDPDGLAAKDGRIPYTRLRKLIGYDNSPVCFAQERDTSGGGITVNPTDPLMARWIDGWVDLPLKARSLYVRDVVARGADSAALARLLAEGAHGVPPVAAAAVPAATAAILESDIMQPGRYSVCPWAAEAILDAWANAPTEGFYDVTRGLFGFAPGEIVLEDLRRARGALLAHLPRTMAAARTPNRAAQQRGPLPAYESVIPSQLITSLRRAHKGRAADWSAADPEERNPFLRTWTGNAATDHILNQVRKTANEVITKYGNRRGWDPLPSRITVELAREAKHGVIRRNEIAKENRENEGRRKKESAALDTFCQDNTVSWQAGGLPKERAALRLRLAQRQEFFCPYCAERPKLRATDLFSPAETEIDHVIERRMGGDGPDNLVLAHKDCNNAKGKKTPHEHAGDLLDSPALAALWQGWRKENADRLKGKGHKARTPREDKDFMDRVGWRFEEDARAKAEENQERRGRRMLHDTARATRLARLYLAAAVMPEDPAEIGAPPVETPPSPEDPTGYTAIYRTISRVQPVNGSVTHMLRQRLLQRDKNRDYQTHHAEDACLLLLAGPAVVQAFNTEAAQHGADAPDDRPVDLMPTSDAYHQQRRARALGRVPLATVDAALADIVMPESDRQDPETGRVHWRLTRAGRGLKRRIDDLTRNCVILSRPRRPSETGTPGALHNATHYGRREITVDGRTDTVVTQRMNARDLVALLDNAKIVPAARLDAAAPGDTILKEICTEIADRHDRVVDPEGTHARRWISARLAALVPAHAEAVARDIAELADLDALADADRTPEQEARRSALRQSPYLGRAISAKKADGRARAREQEILTRALLDPHWGPRGLRHLIMREARAPSLVRIRANKTDAFGRPVPDAAVWVKTDGNAVSQLWRLTSVVTDDGRRIPLPKPIEKRIEISNLEYARLNGLDEGAGVTGNNAPPRPLRQDIDRLTPLWRDHGTAPGGYLGTAVGELEDKARSALRGKAMRQTLTDAGITAEAGWRLDSEGAVCDLEVAKGDTVKKDGKTYKVGVITQGIFGMPVDAAGSAPRTPEDCEKFEEQYGIKPWKAKGIPLA

SEQ ID NO: 326 - protein, 984 aa, Campylobacter coli
MARILAFDIGISSIGWAFSENDELKDCGVRIFTKAENPKTGESLALPRRLARSARKCLARRKARLNHLKHLIANEFKLNYEDYQSFDESLAKAYKGSLISPYELRFRALNELLSKQDFARVILHIAKRRGYDDIKNNGDEEKSEILKAIKQNEEKLVNYQSVGEYLYKEYFQKFKENSKEFINVRNKKESYERCIAQSFLKDELKLIFQKQREFGFSFSKKFEEEVLSVAFYKRALKDFSHLVGNCSFFTDEKRAPKNSPLAFMFVALTRIINLLNNLKNTEGILYTKDDLNALLNEVLKNGTLTYKQTKKLLGLSDDYEFKGEKGTYFIEFKKYKEFIKALGEHNLSQDDLNEIAKDITLIKDEIKLKKALAKYDLNQNQIDSLSKLEFKDHLNISFKALKLITPLMLEGKKYDEACNELNLKVAINEDKKDFLPAFNETYYKDEVTNPVVLRAIKEYRKVLNALLKKYGKVHKINIELAREVGKNHSQRAKIEKEQNENYKAKKDAELECEKLGLKINSKNILKLRLFKEQKEFCAYSGEKIKISDLQDEKMLEIDHIYPYSRSFDDSYMNKVLVFTKQNQEKLNQTPFEAFGNDSAKWQKIEVLAKNLPTKKQKRILDKNYKDKEQKNFKDRNLNDTRYIARLVLNYTKDYLDFLPLSDDENTKLNDTQKGSKVHVEAKSGMLTSALRHTWGFSAKDRNNHLHHAIDAVIIAYANNSIVKAFSDFKKEQESNSAELYAKKISELDYKNKRKFFEPFSGFRQKVLDKIDEIFVSKPERKKPSGALHEETFRKEEEFYQSYGGKEGVLKALELGKIRKVNGKIVKNGDMFRVDIFKHKKTNKFYAVPIYTMDFALKVLPNKAVARSKKGEIKDWILMDENYEFCFSLYKDSLILIQTKDMQEPEFVYYNAFTSSTVSLIVSKHDNKFETLSKNQKILFKNANEKEVIAKSIGIQNLKVFEKYIVSALGEVTKAEFRQREDFKK

SEQ ID NO: 327 - protein, 984 aa, Campylobacter coli
MARILAFDIGISSIGWAFSENDELKDCGVRIFTKAENPKTGESLALPRRLARSARKRLARRKARLNHLKHLIANEFKLNYEDYQSFDESLAKAYKGSLISPYELRFRALNELLSKQDFARVILHIAKRRGYDDIKNNGDEEKGKILKAIKQNEEKLVNYQSVGEYLYKEYFQKFKENSKEFINVRNKKESYERCITQSFLKYELKLIFQKQREFGFSFSKKFEEEVLSVAFYKRALKDFSHLVGNCSFFSDEKRAPKNSPLAFMFVALTRIINLLNNLKNTEGILYTKDDLNALLNEVLKNGTLTYKQTKKLLGLSDDYEFKGEKGTYFIEFKKYKEFIKALGEHNLSQDDLNEIAKDITLIKDEIKLKKALAKYDLNQNQIDSLSKLEFKDHLNISFKALKLITPLMLEGKKYDEACNELNLKVAINEDKKDFLPAFNETYYKDEVTNPVVLRAIKEYRKVLNALLKKYGKVHKINIELAREVGKNYSQRAKIEKEQNENYKAKKDAELECEKLGLKINSKNILKLRLFKEQKEFCAYSGEKIKISDLQDEKMLEIDHIYPYSRSFDDSYMNKVLVFTKQNQEKLNQTPFEAFGNDSAKWQKIEVLAKNLPTKKQKRILDKNYKDKEQKNFKDRNLNDTRYIARLVLNYTKDYLDFLPLSDDENTKLNDTQKGSKVHVEAKSGMLTSALRHTWGFSAKDRNNHLHHAIDAVIIAYANNSIVKAFSDFKKEQESNSAELYAKKISELDYKNKRKFFEPFSGFRQKVLDKIDEIFVSKPERKKPSGALHEETFRKEEEFYQSYGGKEGVLKALELGKIRKVNGKIVKNGDMFRVDIFKHKKTNKFYAVPIYTMDFALKVLPNKAVARSKKGEIKDWILMDENYEFCFSLYKDSLILIQTKDMQEPEFVYYNAFTSSTVSLIVSKHDNKFETLSKNQKILFKNANEKEVIAKSIGIQNLKVFEKYIVSALGEVTKAEFRQREDFKK

SEQ ID NO: 328 - protein, 984 aa, Campylobacter coli
MARILAFDIGISSIGWAFSENDELKDCGVRIFTKAENPKTGESLALPRRLARSARKRLARRKARLNHLKHLIANEFKLNYEDYQSFDESLAKAYKGSLISPYELRFRALNELLSKQDFARVILHIAKRRGYDDIKNNGDEEKSEILKAIKQNEEKLVNYQSVGEYLYKEYFQKFKENSKEFINVRNKKESYERCIAQSFLKDELKLIFQKQREFGFSFSKKFEEEVLSVAFYKRALKDFSHLVGNCSFFTDEKRAPKNSPLAFMFVALTRIINLLNNLKNTEGILYTKDDLNTLLNEVLKNGTLTYKQTKKLLGLSDDYEFKGEKGTYFIEFKKYKEFIKALGEHNLSQDNLNEIAKDITLIKDEIKLKKALAKYDLNQNQIDSLSKLEFKDHLNISFKALKLITPLMLEGKKYDEAYNELNLKVAINEDKKDFLPAFNETYYKDEVTNPVVLRAIKEYRKVLNALLKKYGKVHKINIELAREVGKNHSQRAKIEKEQNENYKAKKDAELECEKLGLKINSKNILKLRLFKEQKEFCAYSGEKIKISDLQDEKMLEIDHIYPYSRSFDDSYMNKVLVFTKQNQEKLNQTPFEAFGNDSAKWQKIEVLAKNLPTKKQKRILDKNYKDKEQKDFKDRNLNDTRYIARLVLNYTKDYLDFLPLSDDENTKLNDTQKGSKVHVEAKSGMLTSALRHTWGFSAKDRNNHLHHAIDAVIIAYANNSIVKAFSDFKKEQESNSAELYAKKISELDYKNKRKFFEPFSGFRQKVLDKIDEIFVSKPERKKPSGALHEETFRKEEEFYQSYGGKEGVLKALELGKIRKVNGKIVKNGDMFRVDIFKHKKTNKFYAVPIYTMDFALKVLPNKAVARSKKGEIKDWILMDENYEFCFSLYKDSLILIQTKDMQEPELVYFNAFTSSTVSLIVSKHDNKFETLSKNQKILFKNANEKEVIAKSIGIQNLKVFEKYIVSALGEVTKAEFRQREDFKK

SEQ ID NO: 329 - protein, 984 aa, Campylobacter coli
MARILAFDIGISSIGWAFSENDELKDCGVRIFTKAENPKTGESLALPRRLARSARKRLARRKARLNHLKHLIANEFKLNYEDYQSFDESLAKAYKGSLISPYELRFRALNELLSKQDFARVILHIAKRRGYDDIKNNGDEEKSEILKAIKQNEEKLVNYQSVGEYLYKEYFQKFKENSKEFINVRNKKESYERCIAQSFLKDELKLIFQKQREFGFSFSKKFEEEVLSVAFYKRALKDFSHLVGNCSFFTDEKRAPKNSPLAFMFVALTRIINLLNNLKNTEGILYTKDDLNALLNEVLKNGTLTYKQTKKLLGLSDDYEFKGEKGTYFIEFKKYKEFIKALGEHNLSQDDLNEIAKDITLIKDEIKLKKALAKYDLNQNQIDSLSKLEFKDHLNISFKALKLITPLMLEGKKYDEACNELNLKVAINEDKKDFLPAFNETYYKDEVTNPVVLRAIKEYRKVLNALLKKYGKVHKINIELAREVGKNYSQRAKIEKEQNENYKAKKDAELECEKLGLKINSKNILKLRLFKEQKEFCAYSGEKIKISDLQDEKMLEIDHIYPYSRSFDDSYMNKVLVFTKQNQEKLNQTPFEAFGNDSAKWQKIEVLAKNLPTKKQKRILDKNYKDKEQKNFKDRNLNDTRYIARLVLNYTKDYLDFLPLSDDENTKLNDTQKGSKVHVEAKSGMLTSALRHTWGFSAKDRNNHLHHAIDAVIIAYANNSIVKAFSDFKKEQESNSAELYAKKISELDYKNKRKFFEPFSGFRQKVLDKIDEIFVSKPERKKPSGALHEETFRKEEEFYQSYGGKEGVLKALELGKIRKVNGKIVKNGDMFRVDIFKHKKTNKFYAVPIYTMDFALKVLPNKAVARSKKGEIKDWILMDENYEFCFSLYKDSLILIQTKDMQEPEFVYYNAFTSSTVSLIVSKHDNKFETLSKNQKILFKNANEKEVIAKSIGIQNLKVFEKYIVSALGEVTKAEFRQREDFKK

SEQ ID NO: 330 - protein, 987 aa, Campylobacter coli
MARILAFDIGISSIGWAFSENDELKDCGVRIFTKAENPKTGESLALPRRLARSARKRLARRKARLNHLKHLIANEFKLNYEDYQSFDESLAKAYKGSLISPYELRFRALNELLSKQDFARVILHIAKRRGYDDIKNNGDEEKSEILKAIKQNEEKLVNYQSVGEYLYKEYFQKFKENSKEFINVRNKKESYERCIAQSFLKDELKLIFQKQREFGFSFSKKFEEEVLSVAFYKRALKDFSHLVGNCSFFTDEKRAPKNSPLAFMFVALTRIINLLNNLKNTEGILYTKDDLNTLLNEVLKNGTLTYKQTKKLLGLSDDYEFKGEKGTYFIEFKKYKEFIKALGEHNLSQDNLNEIAKDITLIKDEIKLKKALAKYDLNQNQIDSLSKLEFKDHLNISFKALKLITPLMLEGKKYDEAYNELNLKVAINEDKKDFLPAFNETYYKDEVTNPVVLRAIKEYRKVLNALLKKYGKVHKINIELAREVGKNHSQRAKIEKEQNENYKAKKDAELECEKLGLKINSKNILKLRLFKEQKEFCAYSGEKIKISDLQDEKMLEIDHIYPYSRSFDDSYMNKVLVFTKQNQEKLNQTPFEAFGNDSAKWQKIEVLAKNLPTKKQKRILDKNYKDKEQKDFKDRNLNDTRYIARLVLNYTKDYLDFLPLSDDENTKLNDTQKGSKVHVEAKSGMLTSALRHTWGFSAKDRNNHLHHAIDAVIIAYANNSIVKAFSDFKKEQESNSAELYAKKISELDYKNKRKFFEPFSGFRQKVLDKIDEIFVSKPERKKPSGALHEETFRKEEEFYQSYGGKEGVLKALELGKIRKVNGKIVKNGDMFRVDIFKHKKTNKFYAVPIYTMDFALKVLPNKAVARSKKGEIKDWILMDENYEFCFSLYKDSLILIQTKDMQEPELVYFNAFTSSTVSLIVSKHDNKFETLSKNQKILFKNANEKEVIAKSIGIQNLKVFEKYIVSALGEVTKAEFRQREDFKNELR

SEQ ID NO: 331 - protein, 984 aa, Campylobacter coli
MARILAFDIGISSIGWAFSENDELKDCGVRIFTKAENPKTGESLALPRRLARSARKRLARRKARLNHLKHLIANEFKLNYEDYQSFDESLAKAYKGSLISPYELRFRALNELLSKQDFARVILHIAKRRGYDDIKNNGDEEKSEILKAIKQNEEKLVNYQSVGEYLYKEYFQKFKENSKEFINVRNKKESYERCIAQSFLKDELKLIFQKQREFGFSFSKKFEEEVLSVAFYKRALKDFSHLVGNCSFFTDEKRAPKNSPLAFMFVALTRIINLLNNLKNTEGILYTKDDLNTLLNEVLKNGTLTYKQTKKLLGLSDDYEFKGEKGTYFIEFKKYKEFIKALGEHNLSQDNLNEIAKDITLIKDEIKLKKALAKYDLNQNQIDSLSKLEFKDHLNISFKALKLITPLMLEGKKYDEAYNELNLKVAINEDKKDFLPAFNETYYKDEVTNPVVLRAIKEYRKVLNALLKKYGKVHKINIELAREVGKNHSQRAKIEKEQNENYKAKKDAELECEKLGLKINSKNILKLRLFKEQKEFCAYSGEKIKISDLQDEKMLEIDHIYPYSRSFDDSYMNKVLVFTKQNQEKLNQTPFEAFGNDSAKWQKIEVLAKNLPTKKQKRILDKNYKDKEQKDFKDRNLNDTRYIARLVLNYTKDYLDFLPLSNDENTKLNDTQKGSKVHVEAKSGMLTSALRHTWGFSAKDRNNHLHHAIDAVIIAYANNSIVKAFSDFKKEQESNSAELYAKKISELDYKNKRKFFEPFSGFRQKVLDKIDEIFVSKPERKKPSGALHEETFRKEEEFYQSYGGKEGVLKALELGKIRKVNGKIVKNGDMFRVDIFKHKKTNKFYAVPIYTMDFALKVLPNKAVARSKKGEIKDWILMDENYEFCFSLYKDSLILIQTKDMQEPELVYFNAFTSSTVSLIVSKHDNKFETLSKNQKILFKNANEKEVIAKSIGIQNLKVFEKYIVSALGEVTKAEFRQREDFKK

SEQ ID NO: 332 - protein, 987 aa, Campylobacter coli
MARILAFDIGISSIGWAFSENDELKDCGVRIFTKAENPKTGESLALPRRLARSARKRLARRKARLNHLKHLIANEFKLNYEDYQSFDESLAKAYKGSLISPYELRFRALNELLSKQDFARVILHIAKRRGYDDIKNSDDKEKGAILKAIKQNEEKLANYQSVGEYLYKEYFQKFKENSKEFTNVRNKKESYERCIAQSFLKDELKLIFKKQREFGFSFSKKFEEEVLSVAFYKRALKDFSHLVGNCSFFTDEKRAPKNSPLAFMFVALTRIINLLNNLKNTEGILYTKDDLNALLNEVLKNGTLTYKQTKKLLGLSDDYEFKGEKGTYFIEFKKYKEFIKALGDHSLSQDDLNEIAKDITLIKDEIKLKKALAKYDLNQNQIDSLSKLEFKDHLNISFKALKLITPLMLEGKKYDEACNELNLKVAINEDKKDFLPAFNETYYKDEVTNPVVLRAIKEYRKVLNALLKKYGKVHKINIELAREVGKNYSQRAKIEKEQNENYKAKKDAELECEKLGLKINSKNILKLRLFKEQKEFCAYSGEKIKISDLQDEKMLEIDHIYPYSRSFDDSYMNKVLVFTKQNQEKLNKTPFEAFGNDSTKWQKIEVLAKNLPEKKQKRILDKNYKDKEQKDFKDRNLNDTRYIARLVLNYTKDYLDFLPLSDDENTKLNDTQKGSKVHVEAKSGMLTSALRHTWGFSTKDRNNHLHHAIDAVIIAYANNSIVKAFSDFKKEQESNSAELYAKKISELDYKNKRKFFEPFSGFRQKVLDKIDEIFVSKPERKKPSGALHEETFRKEEEFYQSYGGKEGVLKALELGKIRKVNGKIVKNGDMFRVDIFKHKKTNKFYAVPIYTMDFALKVLPNKAVARSKKGEIKDWILMDENYEFCFSLYKDSLILIQTKDMQEPEFVYYNAFTSSTVSLIVSKHDNKFETLSKNQKILFKNANEKEVIAKSIGIQNLKVFEKYIVSALGEVTKAEFRQREDFKNELR

SEQ ID NO: 333 - protein, 984 aa, Campylobacter coli
MARILAFDIGISSIGWAFSENDELKDCGVRIFTKAENPKTGESLALPRRLARSARKRLARRKARLNHLKHLIANEFKLNYEDYQSFDESLAKAYKGSLISPYELRFRALNELLSKQDFARVILHIAKRRGYDDIKNSDDKEKGAILKAIKQNEEKLTNYQSVGEYLYKEYFQKFKENSKEFTNVRNKKESYERCIAQSFLKDELKLIFKKQREFGFSFSKKFEEEVLSVAFYKRALKDFSHLVGNCSFFTDEKRAPKNSPLAFMFVALTRIINLLNNLKNTEGILYTKDDLNALLNEVLKNGTLTYKQTKKLLGLSDDYEFKGEKGTYFIEFKKYKEFIKALGDHSLSQDDLNEIAKDITLIKDEIKLKKALAKYDLNQNQIDSLSKLEFKDHLNISFKALKLITPLMLEGKKYDEACNELNLKVAINEDKKDFLPAFNETYYKDEVTNPVVLRAIKEYRKVLNALLKKYGKVHKINIELAREVGKNYSQRAKIEKEQNENYKAKKDAELECEKLGLKINSKNILKLRLFKEQKEFCAYSGEKIKISDLQDEKMLEIDHIYPYSRSFDDSYMNKVLVFTKQNQEKLNQTPFEAFGNDSAKWQKIEVLAKNLPTKKQKRILDKNYKDKEQKDFKDRNLNDTRYIARLVLNYTKDYLDFLPLSDDENTKLNDTQKGSKVHVEAKSGMLTSALRHTWGFSAKDRNNHLHHAIDAVIIAYANNSIVKAFSDFKKEQESNSAELYAKKISELDYKNKRKFFEPFSGFRQKVLDKIDEIFVSKPERKKPSGALHEETFRKEEEFYQSYGGKEGVLKALELGKIRKVNGKIVKNGDMFRVDIFKHKKTNKFYAVPIYTMDFALKVLPNKAVARSKKGEIKDWILMDENYEFCFSLYKDSLILIQTKDMQEPEFVYYNAFTSSTVSLIVSKHDNKFETLSKNQKILFKNANEKEVIAKSIGIQNLKVFEKYIVSALGEVTKAEFRQREDFKK

SEQ ID NO: 334 - protein, 965 aa, Campylobacter coli
MKIIGFNLGIANIGWALRENDEIIDCGVRVFDIPENPKNGNSLALERRENKARMKIVKRKKARMLATKTFLKKELNVDLSKLFLIGSTQSIYELRTKALSSLISKEELSAIILHIAKHRGYDDSALKNENGTIIEALNKNKEAMLKFKSVGEYFYKNFVQNKEVKKIRNTTEDYSNSVPRSLLKQELDLILDKQKELGLIKNADFKAKLFEIIFFKRPLKDFSNKIGNCIFFENEKRAAKNTISACEFVALGKVVNLLKSIEKDIGIVYEKDSINEIMSIILDKTSISYKKIRDILNLPQDINFKGLDYSKNNVENSKLVDLKKLNEFKKALGDGFTNLDKDILDSIATDITLTKDTATLKEKLKNYNVLNAEQIEKLSELVFNDHINLSLKALKQIIPLMYEGKRYDEACELCNFTIAKNQEKNEYLPLFEKTRFAKDISSPVVIRAICEFRKLLNDIIRRYGSVHKIHLELTRDFGISFNDRKKIIKEIEQNEQSRIKALETIKELKLEETSKNIQIVRLFEDQKGICPYSGLKMDLKCLDELVIDYIRPYNRSLDDSYSNKVLTFKKLNDLKQGKTPFEAFGEDEKLWAEINERIKEYNGKKRFKIFDKFFKDKKPFDFTEQTLQDTRWLTKLVASYLNEYLSFLPISEDENTALGYGEKGSKQHVILSSGMITQMLRNFWYLGFKNHKDYKNNAMDAIIVAFTTNSIIFTFNNFKKELDLAKAEFYANKISESDYLLKRKFLPPFSGFKEQALEKVKNIFVSHSLKIKNKGTLHELTPLKIKELKNTYGDLDLAVKLGKIRKYNDKYYANAKGSLVRTDLFADKENKFHAVSIYKADFSTKKLPNKTPATTSNGETKEGIEMNENYNFCMSLYKNTPISVKIKGMKEPIICYYHGFNTSGSKITYKKHDNNYHNLSEDEMVVFRKNDKESIVVGKILEIKKYSISPSGELSLIENEERKWF

SEQ ID NO: 335 - protein, 965 aa, Campylobacter coli
MKIIGFNLGIANIGWALRENDEIIDCGVRVFDIPENPKNGNSLALERRENKARMKIVKRKKARMLATKTFLKKELNVDLSKLFLIGSTQSIYELRTKALSSLISKEELSAIILHIAKHRGYDDSALKNENGTIIEALNKNKEAMLKFKSVGEYFYKNFVQNKEVKKIRNTTEDYSNSVPRSLLKQELDLILDKQKELGLIKNADFKAKLFEIIFFKRPLKDFSNKIGNCIFFENEKRAAKNTISACEFVALGKVVNLLKSIEKDIGIVYEKDSINEIMSIILDKTSISYKKIRDILNLPQDINFKGLDYSKNNAENSKLVDLKKLNEFKKALGDGFANLDKDILDSIATDITLTKDTATLKEKLKNYNVLNAEQIEKLSELVFNDHINLSLKALKQIIPLMYEGKRYDEACELCNFTIAKNQEKNEYLPLFEKTRFAKDISSPVVIRAICEFRKLLNDIIRRYGSVHKIHLELTRDFGISFNDRKKIIKEIEQNEQSRIKALETIKELKLEETSKNIQIVRLFEDQKGICPYSGLKMDLKCLDELVIDYIRPYNRSLDDSYSNKVLTFKKLNDLKQGKTPFEAFGEDEKLWAEINERIKEYNGKKRFKIFDKFFKDKKPFDFTEQTLQDTRWLTKLVASYLNEYLSFLPISEDENTALGYGEKGSKQHVVLSSGMITQMLRNFWYLGFKNHKNYKNNAMDAIIVAFTTNSIIFAFNNFKKELDLAKAEFYANKISESDYLLKRKFLPPFSGFKEQALEKVKNIFVSHSLKIKNKGTLHELTPLKIKELKNTYGDLDLAVKLGKIRKYNDKYYANTKGSLVRTDLFVDKENKFHAVSIYKADFSTKKLPNKTPATTSNGETKEGIEMNENYNFCMSLYKNTPVSVKIKGMKEPIICYYHGFNTSGSKITYKKHDNNYHNLSEDEMVVFRKNDKESIVVGKILEIKKYSISPSGELSLIENEKRKWF

SEQ ID NO: 336 - protein, 965 aa, Campylobacter coli
MKIIGFNLGIANIGWALRENDEIIDCGVRVFDIPENPKNGNSLALERRENKARMKIVKRKKARMLATKTFLKKELNVDLSKLFLIGSTQSIYELRTKALSSLISKEELSAIILHIAKHRGYDDSALKNENGTIIEALNKNKEAMLKFKSVGEYFYKNFVQNKEVKKIRNTTEDYSNSVPRSLLKQELDLILDKQKELGLIKNADFKEKLFEIIFFKRPLKDFSNKIGNCIFFENEKRAAKNTISACEFVALGKVVNLLKSIEKDIGIVYEKDSINEIMSIILDKTSISYKKIRDILNLPQDINFKGLDYSKNNAENSKLVDLKKLNEFKKALGDGFANLDKDILDSIATDITLTKDTATLKEKLKNYNVLNAEQIEKLSELVFNDHINLSLKALKQIIPLMYEGKRYDEACELCNFTIAKNQEKNEYLPLFEKTRFAKDISSPVVIRAICEFRKLLNDIIRRYGSVHKIHLELTRDFGISFNDRKKIIKEIEQNEQSRIKALETIKELKLEETSKNIQIVRLFEDQKGICPYSGLKMDLKCLDELVIDYIRPYNRSLDDSYSNKILTFKKLNDLKQGKTPFEAFGEDEKLWAEINERIKEYNGKKRFKIFDKFFKDKKPFDFTEQTLQDTRWLTKLVASYLNEYLLFLPINEDENTALGYGEKGSKQHVVLSSGMITQMLRNFWYLGFKNHKDYKNNAMDAIIVAFTTNSIIFAFNNFKKELDLAKAEFYANKISESDYLLKRKFLPPFSGFKEQALEKVKNIFVSHSLKIKNKGTLHELTPLKIKELKNTYGDLDLAVKLGKIRKYNDKYYANAKGSLVRTDLFADKENKFHAVSIYKADFSTKKLPNKTPATTSNGETKEGIEMNENYNFCMSLYKNTPISVKIKGMKEPIICYYHGFNTSGSKITYKKHDNNYHNLSEDEMVVFRKNDKESIVVGKILEIKKYSISPSGELSLIENEERKWF

SEQ ID NO: 337 - protein, 933 aa, Campylobacter coli
MKIIGFNLGIANIGWALRENDEIIDCGVRVFDIPENPKNGNSLALERRENKARMKIVKRKKARMLATKTFLKKELNVDLSKLFLIGSTQSIYELRTKALSSLISKEELSVIILHIAKHRGYDDSALKNENGTIIEALNKNKETMLKFKSVGEYFYKNFVQNKEVKKIRNTTEDYSNSVPRSLLKQELDLILDRQKELGLIKNADFKAKLFEIIFFKRPLKDFSNKIGNCIFFENEKRAAKNTISACEFVALGKVVNLLKSIEKDIGIVYEKDSINEIMSIILDKTSISYKKIRDILNLPQDINFKGLDYSKNNVENSKLVDLKKLNEFKKALGDGFTNLDKDILDSIATDITLTKDTATLKEKLKNYNVLNAEQIEKLSELVFNDHINLSLKALKQIIPLMYEGKRYDEACELCNFTIAKNQEKNEYLPLFEKTRFAKDISSPVVIRAICEFRKLLNDIIRRYGSVHKIHLELTRDFGISFNDRKKIIKEIEQNEQSRIKALETIKELKLEETSKNIQIVRLFEDQKGICPYSGLKMDLKCLDELVIDYIRPYNRSLDDSYSNKVLTFKKLNDLKQGKTPFEAFGEDEKLWAEINERIKEYNGKKRFKIFDKFFKDKKPFDFTEQTLQDTRWLTKLVASYLNEHLSFLPISEDENTALGYGEKGSKQHVILSSGMITQMLRNFWYLGFKNHKDYKNNAMDAIIVAFTTNSIIFTFNNFKKELDLAKAEFYANKISESDYLLKRKFLPPFSGFKEQALEKVKNIFVSHSLKIKNKGTLHELTPLKIKELKNTYGDLDLAVKLGKIRKYNDKYYANANGSLVRSDLFIDKKNKFHAVPIYKADFSTKKLPNKTPATTSNGETKEGIEMNENYNFCMSLYKNTPISVKIKGMKESIICYYHGFNTSGSKITYKKHDNNYHNLSEDEMVVFRKNDKE

SEQ ID NO: 338 - protein, 666 aa, Campylobacter jejuni
KGEKGTYFIEFKKYKEFIKALDEHSLSQDDLNEIAKDITLIKDEIKLKKALAKYDLKENQIDSLSKLEFKDHLNISFKALKLITPLMLEGKKYDEACNELNLKVAINEDKKDFLPAFNETYYKDEVTNPVVLRAIKEYRKILNALLKKYGKVHKINIELAREVGKNHSQRAKIEKEQNENYKAKKDAELECEKLGLKINSKNILKLRLFKEQKEFCVYSGEKIKLSDLQDEKMLEIDHIYPYSRSFDDSYMNKVLVFAKQNQEKLNKTPFEAFGNDSTKWQKIEVLTKNLPTKKQKRILDKNYKDKEQKDFKDRNLNDTRYIARLVLNYTKDYLDFLPLSDDENTKLNDTQKGSKVHVEAKSGMLTSALRHTWGFSTKDRNNHLHHAIDAAIIAYANNSIVKAFSDFKKEQESNSAELYAKKISELDYKNKRKFFEPFSGFRQKVLDKIDEIFVSKPERKKPSGALHEETFRKEEEFYQSYGGKEGVLKALELGKIRKVNGKIVKNGDMFRVDIFKHKKTNKFYAVPIYTMDFALKVLPNKAVARSKKGEIKDWILMDEDYEFCFSLYKDSLILIQTKDMQEPELVYFNAFTSSTVSLIVSKHDNKFETLSKNQKILFKNANEKEVIAKSIGIQNLKVFEKYIVSALGEVTKAEFRQREDFKNELR

SEQ ID NO: 339 - protein, 190 aa, Campylobacter jejuni
MAFDIGISSIGWAFSENDELKDCGVRIFTKVENPKTGESLALPRRLARSARKRLARRKARLNHLKHLIANEFKLNYEDYQSFDESLAKAYKGSLISPYELRFRALNELLSKQDFARVILHIAKRRGYDDIKNSDDKEKGAILKAIKQNEEKLANYQSVGEYLYKEYFQKFKENSKEFTNVRNKKKVMNAA

SEQ ID NO: 340 - protein, 985 aa, Campylobacter jejuni
MAKILAFDIGISSIGWAFVENDELKDCGVRIFTKAENPKTGESLALPRRLARSARKRLARRKARLNHLKHLIANEFKLNYEDYQSFDESLAKAYKGTLISPYELRFKALNELLSKQDLARVILHIAKRRGYDNIKNSDDKEKGAILKAVKENEEKLANYKSVGEYLYKEYFQKFKENSKEFINVRNKKESYERCIAQSFLKDELKLIFQKQREFGFNFSKKFEEEVLSVAFYKRALKDFSHLVGNCSFFVDEKRAPKNSPLAFEFVALTRIVNLLNNLNKNNSYIKDDLNALLSEVLKNGTLTYKQTKKILGLSDDYEFKGQKGNYFIEFKKYKEFIKALCEHNLNQDDLNEIAKDITLVKDETKLKKALAKYDLNQNQIENLSKIEFKDHLNISFKALKLIVPLMREGKKYDEVCNELNLKTAINEDKKEFLPAFNETYYKDEVNNPVVLRAIKEYRKVLNSLLKKYGKVHKINIELAREVGKNHRERSKIEKEQNENFKAKKDAELECEKLGLKINSKNILKLRLFKEQKEFCVYSGEKIKISDLQDEKMLEIDHIYPYSRSFDDSYMNKVLVFTKQNQEKLNKTPFEAFGKDDVKWQKIETLAKNLPAKKQKRILDKNYKDKEQKDFKDRNLNDTRYIARLVLNYTKDYLEFLPLSDDENIKLNDTQKGSKVHVEAKSGMLTSVLRHTWGFSTKDRNNHLHHAIDAVIIAYANASVVKAFSDFKKEQENYTAELYAKKINELDFKNKRKFFEPFSNFRQKVLEKIDEIFVSKPERKKPSGALHEETFYKEEEFYKEYGGKEGVLKALELGKIRKVNGKIVSNANMFRVDIFKYKKTNKFYAVPIYTMDFALGILPNKAVVGGKDKQGIIKDWLLMDENYEFCFSLYKDSLILLQTKDMQEPELVYFKSFKSSTAGLVVSKHDNKFENLNENQKKLFKSANEKKVVAEGIGIQNLKVFEKYIVSALGEITKAEIKERENFKKK

SEQ ID NO: 341 - protein, 987 aa, Campylobacter jejuni
MARILAFDIGISSIGWAFSENDELKDCGVRIFTKAENPKTGESLALPRCLARSARKRLARRKARLNHLKHLIANEFKLNYEDYQSFDESLAKAYKGSLISPYELRFRALNELLSKQDFARVILHIAKRRGYDDIKNNGDEEKGEILKAIKQNEEKLVSYQSVGEYLYKEYFQKFKENSKEFINVRNKKESYERCIAQSFLKDELKLIFQKQRKFGFSFSKKFEEEVLSVAFYKRALKDFSHLVGNCSFFTDEKRAPKNSPLAFMFVALTRIINLLNNLKNTEGILYTKDDLNTLLNEVLKNGTLTYKQTKKLLGLSNDYEFKGEKGTYFIEFQKYKEFVKALGEHNLSQDDLNEIAKDITLIKDEIKLKKALAKYDLNQNQIDSLSKLEFKDHLNISFKALKLITPLMLEGKKYDEACNELNLKVAINEDKKDFLPAFNETYYKDEVTNPVVLRAIKEYRKVLNALLKKYGKVHKINIELAREVGKNHSQRAKIEKEQNENYKAKKDAELECEKLGLKINSKNILKLRLFKEQKEFCVYSGEKIKISDLQDEKMLEIDHIYPYSRSFDDSYMNKVLVFTKQNQEKLNKTPFETFGNDRVKWQKIEVLAKNLPTKKQKRILDKNYKDKEQKDFKDRNLNDTRYIARLVLNYTKDYLDFLPLSDDENTKLNDTQKGSKVHVEAKSGMLTSTLRHTWGFSTKDRNNHLHHAIDAAIIAYANNSIVKAFSDFKKEQESNTAELYAKKISELDYKNKRKFFEPFSGFRQKLLDKIDEIFVSKPERKKPSGALHEETFRKEEEFYQSYGGKEGVLKALELGKIRKVNGKIVSNGDMFRVDIFKHKKTNKFYAVPIYTMDFALKVLPNKAVVQGKDKKSGLIKDWILMDENYEFCFSLYKDSLILIQTKDMQEPELVYYERLDSSNASLTVSKHDNKFETLSKNQKILFKNANEKEVIAKSIGIQNLKVFEKYIVSALGEVTKAEFRQREDFKK

SEQ ID NO: 342 - protein, 987 aa, Campylobacter jejuni
MARILAFDIGISSIGWAFSENDELKDCGVRIFTKAENPKTGESLALPRRLARSARKRLARRKARLNHLKHLIANEFKLNYEDYQSFDEGLAKAYKGSLISPYELRFRALNELLSKQDFARVILHIAKRRGYDDIKNNGDEEKSEILKAIKQNEEKLVNYQSVGEYLYKEYFQKFKENSKEFINVRNKKESYERCIAQSFLKDELKLIFQKQREFGFSFSKKFEEEVLSVAFYKRALKDFSHLVGNCSFFTDEKRAPKNSPLAFMFVALTRIINLLNNLKNTEGILYTKDDLNTLLNEVLKNGTLTYKQTKKLLGLSDDYEFKGEKGTYFIEFKKYKEFIKALGEHNLSQDNLNEIAKDITLIKDEIKLKKALAKYDLNQNQIDSLSKLEFKDHLNISFKALKLITPLMLEGKKYDEAYNELNLKVAINEDKKDFLPAFNETYYKDEVTNPVVLRAIKEYRKVLNALLKKYGKVHKINIELAREVGKNHSQRAKIEKEQNENYKAKKDAELECEKLGLKINSKNILKLRLFKEQKEFCAYSGEKIKISDLQDEKMLEIDHIYPYSRSFDDSYMNKVLVFTKQNQEKLNQTPFEAFGNDSAKWQKIEVLAKNLPTKKQKRILDKNYKDKEQKDFKDRNLNDTRYIARLVLNYTKDYLDFLPLSDDENTKLNDTQKGSKVHVEAKSGMLTSALRHTWGFSAKDRNNHLHHAIDAVIIAYANNSIVKAFSDFKKEQESNSAELYAKKISELDYKNKRKFFEPFSGFRQKVLDKIDEIFVSKPERKKPSGALHEETFRKEEEFYQSYGGKEGVLKALELGKIRKVNGKIVKNGDMFRVDIFKHKKTNKFYAVPIYTMDFALKVLPNKAVVQGKDKKSGLIKDWILMDENYEFCFSLYKDSLILIQTKDMQEPELVYFNAFTSSTVSLIVSKHDNKFETLSKNQKILFKNANEKEVIAKSIGIQNLKVFEKYIVSALGEVTKAEFRQREDFKK

SEQ ID NO: 343 - protein, 961 aa, Campylobacter jejuni
MARILAFDIGISSIGWAFSENDELKDCGVRIFTKAENPKTGESLALPRRLARSARKRLARRKARLNHLKHLIANEFKLNYEDYQSFDESLAKAYKGSLISPYELRFRALNELLSKQDFARVILHIAKRRGYDDIKNNGDEEKGKILKAIKQNEEKLVNYQSVGEYLYKEYFQKFKENSKEFINVRNKKESYERCITQSFLKYELKLIFQKQREFGFSFSKKFEEEVLSVAFYKRALKDFSHLVGNCSFFSDEKRAPKNSPLAFMFVALTRIINLLNNLKNTEGILYTKDDLNALLNEVLKNGTLTYKQTKKLLGLSDDYEFKGEKGTYFIEFKKYKEFIKALGEHNLSQDDLNEIAKDITLIKDEIKLKKALAKYDLNQNQIDSLSKLEFKDHLNIGFKALKLITPLMLEGKKYDEACNELNLKVAINEDKKDFLPAFNETYYKDEVTNPVVLRAIKEYRKVLNALLKKYGKVHKINIELAREVGKNHSQRAKIEKEQNENYKAKKDAELECEKLGLKINSKNILKLRLFKEQKEFCAYSGEKIKLSDLQDEKMLEIDHIYPYSRSFDDSYMNKVLVFTKQNQEKLNKTPFEAFGNDNVKWQKIEVLAKNLPEKKQKRILDKNYKDKEQKDFKDRNLNDTRYIARLVLNYTKDYLDFLPLSDDENTKLKGSKVHVEAKSGMLTSALRHTWGFSTKDRNNHLHHAIDAAIIAYANNSIVKDFSDFKKEQESNSAELYAKKISELDYKNKRKFFEPFSGFRQKVLDKIDEIFVSKPERKKPSGALHEETFRKEEEFYQSYGGKEGVLKALELGKIRKVNGKIVKNGDMFRVDIFKHKKTNKFYAVPIYTMDFALKVLPNKAVARSKKGEIKDWILMDENYEFCFSLYKDSLILIQTKDMQEPELVYFNAFTSSTVSLIVSKHDNKFETLSKNLKVFEKYIVSALGEVTKAEFRQREDFKNELR

SEQ ID NO: 344 - protein, 984 aa, Campylobacter jejuni
MARILAFDIGISSIGWAFSENDELKDCGVRIFTKAENPKTGESLALPRRLARSARKRLARRKARLNHLKHLIANEFKLNYEDYQSFDESLAKAYKGSLISPYELRFRALNELLSKQDFARVILHIAKRRGYDDIKNNGDEEKGKILKAIKQNEEKLVNYQSVGEYLYKEYFQKFKENSKEFINVRNKKESYERCITQSFLKYELKLIFQKQREFGFSFSKKFEEEVLSVAFYKRALKDFSHLVGNCSFFTDEKRAPKNSPLAFMFVALTRIINILNNLKNTEGILYTKDDLNALLNEVLKNGTLTYKQTKKLLGLSDDYEFKGEKGTYFIEFKKYKEFIKALGEHNLSQDDLNEIAKDITLIKDEIKLKKALAKYDLNQNQIDSLSKLEFKDHLNISFKALKLITPLMLEGKKYDEACNELNLKVAINEDKKDFLPAFNETYYKDEVTNPVVLRAIKEYRKILNALLKKYGKVHKINIELAREVGKNHSQRAKIEKEQNENYKAKKDAEIECEKLGLKINSKNILKLRLFKEQKEFCAYSGEKIKISDLQDEKMLEIDHIYPYSRSFDDSYMNKVLVFTKQNQEKLNQTPFEAFGNDSAKWQKIEVLAKNLPTKKQKRILDKNYKDKEQKDFKDRNLNDTRYIARLVLNYTKDYLDFLPLSDDENTKLNDTQKGSKVHVEAKSGMLTSALRHTWGFSAKDRNNHLHHAIDAVIIAYANNSIVKAFSDFKKEQESNSAELYAKKISELDYKNKRKFFEPFSGFRQKVLDKIDEIFVSKPERKKPSGALHEETFRKEEEFYQSYGGKEGVLKALELGKIRKVNGKIVKNGDMFRVDIFKHKKTNKFYAVPIYTMDFALKVLPNKAVARSKKGEIKDWILMDENYEFCFSLYKDSLILIQTKDMQEPEFVYYNAFTSSTVSLIVSKHDNKFETLSKNQKILFKNANEKEVIAKSIGIQNLKVFEKYIVSALGEVTKAEFRQREDFKK

SEQ ID NO: 345 - protein, 987 aa, Campylobacter jejuni
MARILAFDIGISSIGWAFSENDELKDCGVRIFTKAENPKTGESLALPRRLARSARKRLARRKARLNHLKHLIANEFKLNYEDYQSFDESLAKAYKGSLISPYELRFRALNELLSKQDFARVILHIAKRRGYDDIKNNGDEEKGKILKAIKQNEEKLVSYQSVGEYLYKEYFQKFKENSKEFINVRNKKESYERCIAQSFLKDELKLIFQKQREFGFSFSKKFEEEVLSVAFYKRALKDFSHLVGNCSFLLMKKERQKNSPLAFMFVALTRIINLLNNLKNTEGILYTKDDLNTLLNEALKNGTLTYKQTKKLLGLSNDYEFKGEKGTYFIEFQKYKEFVKALGEHNLSQDDLNEIAKDITLIKDEIKLKKALAKYDLNQNQIDSLSKLEFKDHLNISFKALKLITPLMLEGKKYDEACNELNLKVAINEDKKDFLPAFNETYYKDEVTNPVVLRAIKEYRKVLNALLKKYGKVHKINIELAREVGKNHSQRAKIEKEQNENYKAKKDAELECEKLGLKINSKNILKLRLFKEQKEFCVYSGEKIKISDLQDEKMLEIDHIYPYSRSFDDSYMNKVLVFTKQNQEKLNKTPFETFGNDRVKWQKIEVLAKNLPTKKQKRILDKNYKDKEQKDFKDRNLNDTRYIARLVLNYTKDYLDFLPLSDDENTKLNDTQKGSKVHVEAKSGMLTSTLRHTWGFSTKDRNNHLHHAIDAAIIAYANNSIVKAFSDFKKEQESNTAELYAKKISELDYKNKRKFFEPFSGFRQKLLDKIDEIFVSKPERKKPSGALHEETFRKEEEFYQSYGGKEGVLKALELGKIRKVNGKMVKNGDMFRVDIFKHKKTNKFYAVPIYTMDFALKVLPNKAVVQGKDKKSGLIKDWILMDENYEFCFSLYKDSLILIQTKDMQEPELVYYERLDSSNASLTVSKHDNKFETLSKNQKILFKNANEKEVIAKSIGIQNLKVFEKYIVSALGEVTKAEFRQREDFKK

SEQ ID NO: 346 - protein, 987 aa, Campylobacter jejuni
MARILAFDIGISSIGWAFSENDELKDCGVRIFTKAENPKTGESLALPRRLARSARKRLARRKARLNHLKHLIANEFKLNYEDYQSFDESLAKAYKGSLISPYELRFRALNELLSKQDFARVILHIAKRRGYDDIKNNGDEEKSEILKAIKQNEEKLVNYQSVGEYLYKEYFQKFKENSKEFINVRNKKESYERCIAQSFLKDELKLIFQKQREFGFSFSKKFEEEVLSVAFYKRALKDFSHLVGNCSFFTDEKRAPKNSPLAFMFVALTRIINLLNNLKNTEGILYTKDDLNTLLNEVLKNGTLTYKQTKKLLGLSDDYEFKGEKGTYFIEFKKYKEFIKALGEHNLSQDNLNEIAKDITLIKDEIKLKKALAKYDLNQNQIDSLSKLEFKDHLNISFKALKLITPLMLEGKKYDEAYNELNLKVAINEDKKDFLPAFNETYYKDEVTNPVVLRAIKEYRKVLNALLKKYGKVHKINIELAREVGKNHSQRAKIEKEQNENYKAKKDAELECEKLGLKINSKNILKLRLFKEQKEFCAYSGEKIKISDLQDEKMLEIDHIYPYSRSFDDSYMNKVLVFTKQNQEKLNQTPFEAFGNDSAKWQKIEVLAKNLPTKKQKRILDKNYKDKEQKDFKDRNLNDTRYIARLVLNYTKDYLDFLPLSDDENTKLNDTQKGSKVHVEAKSGMLTSALRHTWGFSAKDRNNHLHHAIDAVIIAYANNSIVKAFSDFKKEQESNSAELYAKKISELDYKNKRKFFEPFSGFRQKVLDKIDEIFVSKPERKKPSGALHEETFRKEEEFYQSYGGKEGVLKALELGKIRKVNGKIVKNGDMFRVDIFKHKKTNKFYPVPIYTMDFALKVLPNKAVVQGKDKKSGLIKDWILMDENYEFCFSLYKDSLILIQTKDMQEPELVYFNAFTSSTVSLIVSKHDNKFETLSKNQKILFKNANEKEVIAKSIGIQNLKVFEKYIVSALGEVTKAEFRQREDFKK

SEQ ID NO: 347 - protein, 987 aa, Campylobacter jejuni
MARILAFDIGISSIGWAFSENDELKDCGVRIFTKAENPKTGESLALPRRLARSARKRLARRKARLNHLKHLIANEFKLNYEDYQSFDESLAKAYKGSLISPYELRFRALNELLSKQDFARVILHIAKRRGYDDIKNNGDEEKSEILKAIKQNEEKLVNYQSVGEYLYKEYFQKFKENSKEFINVRNKKESYERCIAQSFLKDELKLIFQKQREFGFSFSKKFEEEVLSVAFYKRALKDFSHLVGNCSFFTDEKRAPKNSPLAFMFVALTRIINLLNNLKNTEGILYTKDDLNTLLNEVLKNGTLTYKQTKKLLGLSDDYEFKGEKGTYFIEFKKYKEFIKALGEHNLSQDNLNEIAKDITLIKDEIKLKKALAKYDLNQNQIDSLSKLEFKDHLNISFKALKLITPLMLEGKKYDEAYNELNLKVAINEDKKDFLPAFNETYYKDEVTNPVVLRAIKEYRKVLNALLKKYGKVHKINIELAREVGKNHSQRAKIEKEQNENYKAKKDAELECEKLGLKINSKNILKLRLFKEQKEFCAYSGEKIKISDLQDEKMLEIDHIYPYSRSFDDSYMNKVLVFTKQNQEKLNQTPFEAFGNDSAKWQKIEVLAKNLPTKKQKRILDKNYKDKEQKDFKDRNLNDTRYIARLVLNYTKDYLDFLPLSDDENTKLNDTQKGSKVHVEAKSGMLTSALRHTWGFSAKDRNNHLHHAIDAVIIAYANNSIVKAFSDFKKEQESNSAELYAKKISELDYKNKRKFFEPFSGFRQKVLDKIDEIFVSKPERKKPSGALHEETFRKEEEFHQSYGGKEGVLKALELGKIRKVNGKIVKNGDMFRVDIFKHKKTNKFYAVPIYTMDFALKVLPNKAVVQGKDKKSGLIKDWILMDENYEFCFSLYKDSLILIQTKDMQEPELVYFNAFTSSTVSLIVSKHDNKFETLSKNQKILFKNANEKEVIAKSIGIQNLKVFEKYIVSALGEVTKAEFRQREDFKK

SEQ ID NO: 348 - protein, 987 aa, Campylobacter jejuni
MARILAFDIGISSIGWAFSENDELKDCGVRIFTKAENPKTGESLALPRRLARSARKRLARRKARLNHLKHLIANEFKLNYEDYQSFDESLAKAYKGSLISPYELRFRALNELLSKQDFARVILHIAKRRGYDDIKNNGDEEKSEILKAIKQNEEKLVNYQSVGEYLYKEYFQKFKENSKEFINVRNKKESYERCIAQSFLKDELKLIFQKQREFGFSFSKKFEEEVLSVAFYKRALKDFSHLVGNCSFFTDEKRAPKNSPLAFMFVALTRIINLLNNLKNTEGILYTKDDLNTLLNEVLKNGTLTYKQTKKLLGLSDDYEFKGEKGTYFIEFKKYKEFIKALGEHNLSQDNLNEIAKDITLIKDEIKLKKALAKYDLNQNQIDSLSKLEFKDHLNISFKALKLITPLMLEGKKYDEAYNELNLKVAINEDKKDFLPAFNETYYKDEVTNPVVLRAIKEYRKVLNALLKKYGKVHKINIELAREVGKNHSQRAKIEKEQNENYKAKKDAELECEKLGLKINSKNILKLRLFKEQKEFCAYSGEKIKISDLQDEKMLEIDHIYPYSRSFDDSYMNKVLVFTKQNQEKLNQTPFEAFGNDSAKWQKIEVLAKNLPTKKQKRILDKNYKDKEQKDFKDRNLNDTRYIARLVLNYTKDYLDFLPLSDDENTKLNDTQKGSKVHVEAKSGMLTSALRHTWGFSAKDRNNHLHHAIDAVIIAYANNSIVKAFSDFKKEQESNSAELYAKKISELDYKNKRKFFEPFSGFRQKVLDKIDEIFVSKPERKKPSGALHEETFRKEEEFYQSYGGKEGVLKALELGKIRKVNGKIVKNGDMFRVDIFKHKKTNKFYAVPIYTMDFALKVLPNKAVVQGKDKKSGLIKDWILMDENYEFCFSLYKDSLILIQTKDMQEPELVYFNAFTSSTVSLIVSKHDNKFETLSKNQKILFKNANEKEVIAKSIGIQNLKVFEKYIVSALGEVTKAEFRQREDFKK

SEQ ID NO: 349 - protein, 861 aa, Campylobacter jejuni
MARILAFDIGISSIGWAFSENDELKDCGVRIFTKAENPKTGESLALPRRLARSARKRLARRKARLNHLKHLIANEFKLNYEDYQSFDESLAKAYKGSLISPYELRFRALNELLSKQDFARVILHIAKRRGYDDIKNNGDEEKSEILKAIKQNEEKLVNYQSVGEYLYKEYFQKFKENSKEFINVRNKKESYERCITQSFLKDELKLIFQKQREFGFSFSKKFEEEVLSVAFYKRALKDFSHLVGNCSFFTDEKRAPKNSPLAFMFVALTRIINILNNLKNTEGILYTKDDLNALLNEVLKNGTLTYKQTKKLLGLSDDYEFKGEKGTYFIEFKKYKEFIKALGEHNLSQDDLNEIAKDITLIKDEIKLKKALAKYDLNQNQIDSLSKLEFKDHLNISFKALKLITPLMLEGKKYDEACNELNLKVAINEDKKDFLPAFNETYYKDEVTNPVVLRAIKEYRKILNALLKKYGKVHKINIELAREVGKNHSQRAKIEKEQNENYKAKKDAEIECEKLGLKINSKNILKLRLFKEQKEFCAYSGEKIKLSDLQDEKMLEIDHIYPYSRSFDDSYMNKVLVFTKQNQEKLNKTPFEAFGNDSTKWQKIEVLAKNLPEKKQKRILDKNYKDKEQKDFKDRNLNDTRYIARLVLNYTKDYLDFLPLSDDENTKLNDTQKGSKVHVEAKSGMLTSALRHTWGFSAKDRNNHLHHAIDAAIIAYANNSIVKAFSDFKKEQESNSVELYAKKISELDYKNKRKFFEPFSGFRQKVLDKIDEIFVSKPERKKPSGALHEETFRKEEEFYQSYGGKEGVLKALELGKIRKVNGKIVKNGDMFRVDIFKHKKTNKFLCCANLYYGFCFKSITK

SEQ ID NO: 350 - protein, 462 aa, Campylobacter jejuni
MARILAFDIGISSIGWAFSENDELKDCGVRIFTKAENPKTGESLALPRRLARSARKRLARRKARLNHLKHLIANEFKLNYEDYQSFDESLAKAYKGSLISPYELRFRALNELLSKQDFARVILHIAKRRGYDDIKNNGDEEKSEILKAIKQNEEKLVNYQSVGEYLYKEYFQKFKENSKEFINVRNKKESYERCITQSFLKDELKLIFQKQREFGFSFSKKFEEEVLSVAFYKRALKDFSHLVGNCSFFTDEKRAPKNSPLAFMFVALTRIINILNNLKNTEGILYTKDDLNALLNEVLKNGTLTYKQTKKLLGLSDDYEFKGEKGTYFIEFKKYKEFIKALGEHNLSQDDLNEIAKDITLIKDEIKLKKALAKYDLNQNQIDSLSKLEFKDHLNISFKALKLITPLMLEGKKYDEACNELNLKVAINEDKKDFLPAFNETYYKDEVTNPVVLRAIKEYRKS

SEQ ID NO: 351 - protein, 984 aa, Campylobacter jejuni
MARILAFDIGISSIGWAFSENDELKDCGVRIFTKAENPKTGESLALPRRLARSARKRLARRKARLNHLKHLIANEFKLNYEDYQSFDESLAKAYKGSLISPYELRFRALNELLSKQDFARVILHIAKRRGYDDIKNNGDEEKSEILKAIKQNEEKLVNYQSVGEYLYKEYFQKFKENSKEFINVRNKKESYERCITQSFLKDELKLIFQKQREFGFSFSKKFEEEVLSVAFYKRALKDFSHLVGNCSFFTDEKRAPKNSPLAFMFVALTRIINLLNNLKNTEGILYTKDDLNALLNEVLKNGTLTYKQTKKLLGLSDDYEFKGEKGTYFIEFKKYKEFIKALDEHSLSQDDLNEIAKDITLIKDEIKLKKALAKYDLNQNQIDSLSKLEFKDHLNISFKALKLITPLMLEGKKYDEACNELNLKVAINEDKKDFLPAFNETYYKDEVTNPVVLRAIKEYRKILNALLKKYGKVHKINIELAREVGKNHSQRAKIEKEQNENYKAKKDAEIECEKLGLKINSKNILKLRLFKEQKEFCAYSGEKIKISDLQDEKMLEIDHIYPYSRSFDDSYMNKVLVFTKQNQEKLNKTPFEAFGNDGVKWQKIEVLAKNLPEKKQKRILDKNYKDKEQKDFKDRNLNDTRYIARLVLNYTKDYLDFLPLSDDENTKLNDTQKGSKVHVEAKSGMLTSALRHTWGFSTKDRNNHLHHAIDAAIIAYANNSIVKAFSDFKKEQESNSAELYAKKISELDYKNKRKFFEPFSGFRQKVLDKIDEIFVSKPERKKPSGALHEETFRKEEEFYQSYGGKEGVLKALELGKIRKVNGKIVKNGDMFRVDIFKHKKTNKFYAVPIYTMDFALKVLPNKAVARSKKGEIKDWILMDENYEFCFSLYKDSLILIQTKDMQEPELVYFNAFTSSTVSLVVSKHDNKFETLSKNQKILFKNANEKEVIAKSIGIQNLKVFEKYIVSALGEVTKAEFRQREDFKK

SEQ ID NO: 352 - protein, 984 aa, Campylobacter jejuni
MARILAFDIGISSIGWAFSENDELKDCGVRIFTKAENPKTGESLALPRRLARSARKRLARRKARLNHLKHLIANEFKLNYEDYQSFDESLAKAYKGSLISPYELRFRALNELLSKQDFARVILHIAKRRGYDDIKNSDDKEKGAILKAIKQNEEKLANYQSVGEYLYKEYFQKFKENSKEFTNVRNKKESYERCIAQSFLKDELKLIFKKQREFGFSFSKKFEEEVLSVAFYKRALKDFSHLVGNCSFFTDEKRAPKNSPLAFMFVALTRIINLLNNLKNTEGILYTKDDLNALLNEVLKNGTLTYKQTKKLLGLSDDYEFKGEKGTYFIEFKKYKEFIKALGDHSLSQDDLNEIAKDITLIKDEIKLKKALAKYDLNQNQIDSLSKLEFKDHLNISFKALKLITPLMLEGKKYDEACNELNLKVAINEDKKDFLPAFNETYYKDEVTNPVVLRAIKEYRKVLNALLKKYGKVHKINIELAREVGKNYSQRAKIEKEQNENYKAKKDAELECEKLGLKINSKNILKLRLFKEQKEFCAYSGEKIKISDLQDEKMLEIDHIYPYSRSFDDSYMNKVLVFTKQNQEKLNQTPFEAFGNDSAKWQKIEVLAKNLPTKKQKRILDKNYKDKEQKDFKDRNLNDTRYIARLVLNYTKDYLDFLPLSDDENTKLNDTQKGSKVHVEAKSGMLTSALRHTWGFSAKDRNNHLHHAIDAVIIAYANNSIVKAFSDFKKEQESNSAELYAKKISELDYKNKRKFFEPFSGFRQKVLDKIDEIFVSKPERKKPSGALHEETFRKEEEFYQSYGGKEGVLKALELGKIRKVNGKIVKNGDMFRVDIFKHKKTNKFYAVPIYTMDFALKVLPNKAVARSKKGEIKDWILMDENYEFCFSLYKDSLILIQTKDMQEPEFVYYNAFTSSTVSLIVSKHDNKFETLSKNQKILFKNANEKEVIAKSIGIQNLKVFEKYIVSALGEVTKAEFRQREDFKK

SEQ ID NO: 353 - protein, 984 aa, Campylobacter jejuni
MARILAFDIGISSIGWAFSENDELKDCGVRIFTKAENPKTGESLALPRRLARSARKRLARRKARLNHLKHLIANEFKLNYEDYQSFDESLAKAYKGSLISPYELRFRALNELLSKQDFARVILHIAKRRGYDDIKNSDDKEKGAILKAIKQNEEKLANYQSVGEYLYKEYFQKFKENSKEFTNVRNKKESYERCIAQSFLKDELKLIFKKQREFGFSFSKKFEEEVLSVAFYKRALKDFSHLVGNCSFFTDEKRAPKNSPLAFMFVALTRIINLLNNLKNTEGILYTKDDLNTLLNEVLKNGTLTYKQTKKLLGLSDDYEFKGEKGTYFIEFKKYKEFIKALGEHNLSQDDLNEIAKDITLIKDEIKLKKALAKYDLNQNQIDSLSKLEFKDHLNISFKALKLITPLMLEGKKYDEACNELNLKVAINEDKKDFLPAFNETYYKDEVTNPVVLRAIKEYRKVLNALLKKYGKVHKINIELAREVGKNYSQRAKIEKEQNENYKAKKDAELECEKLGLKINSKNILKLRLFKEQKEFCAYSGEKIKISDLQDEKMLEIDHIYPYSRSFDDSYMNKVLVFTKQNQEKLNKTPFEAFGNDSTKWQKIEVLAKNLPEKKQKRILDKNYKDKEQKDFKDRNLNDTRYIARLVLNYTKDYLDFLPLSDDENTKLNDTQKGLKVHVEAKSGMLTSALRHTWGFSAKDRNNHLHHAIDAVIIAYANNSIVKAFSDFKKEQESNSAELYAKKISELDYKNKRKFFEPFSGFRQKVLDKIDEIFVSKPERKKPSGALHEETFRKEEEFYQSYGGKEGVLKALELGKIRKVNGKIVKNGDMFRVDIFKHKKTNKFYAVPIYTMDFALKVLPNKAVARSKKGEIKDWILMDENYEFCFSLYKDSLILIQTKDMQEPEFVYYNAFTSSTVSLIVSKHDNKFETLSKNQKILFKNANEKEVIAKSIGIQNLKVFEKYIVSALGEVTKAEFRQREDFKK

SEQ ID NO: 354 - protein, 984 aa, Campylobacter jejuni
MARILAFDIGISSIGWAFSENDELKDCGVRIFTKAENPKTGESLALPRRLARSARKRLARRKARLNHLKHLIANEFKLNYEDYQSFDESLAKAYKGSLISPYELRFRALNELLSKQDFARVILHIAKRRGYDDIKNSDDKEKGAILKAIKQNEEKLANYQSVGEYLYKEYFQKFKENSKEFTNVRNKKESYERCIAQSFLKDELKLIFKKQREFGFSFSKKFEEEVLSVAFYKRALKDFSHLVGNCSFFTDEKRAPKNSPLAFMFVALTRIINLLNNLKNTEGILYTKDDLNALLNEVLKNGTLTYKQTKKLLGLSDDYEFKGEKGTYFIEFKKYKEFIKALGDHSLSQDDLNEIAKDITLIKDEIKLKKALAKYDLNQNQIDSLSKLEFKDHLNISFKALKLITPLMLEGKKYDEACNELNLKVAINEDKKDFLPAFNETYYKDEVTNPVVLRAIKEYRKVLNALLKKYGKVHKINIELAREVGKNYSQRAKIEKEQNENYKAKKDAELECEKLGLKINSKNILKLRLFKEQKEFCAYSGEKIKISDLQDEKMLEIDHIYPYSRSFDDSYMNKVLVFTKQNQEKLNQTPFEAFGNDSAKWQKIEVLAKNLPTKKQKRILDKNYKDKEQKNFKDRNLNDTRYIARLVLNYTKDYLDFLPLSDDENTKLNDTQKGSKVHVEAKSGMLTSALRHTWGFSAKDRNNHLHHTIDAVIIAYANNSIVKAFSDFKKEQESNSAELYAKKISELDYKNKRKFFEPFSGFRQKVLDKIDEIFVSKPERKKPSGALHEETFRKEEEFYQSYGGKEGVLKALELGKIRKVNGKIVKNGDMFRVDIFKHKKTNKFYAVPIYTMDFALKVLPNKAVARSKKGEIKDWILMDENYEFCFSLYKDSLILIQTKDMQEPEFVYYNAFTSSTVSLIVSKHDNKFETLSKNQKILFKNANEKEVIAKSIGIQNLKVFEKYIVSALGEVTKAEFRQREDFKK

SEQ ID NO: 355 - protein, 984 aa, Campylobacter jejuni
MARILAFDIGISSIGWAFSENDELKDCGVRIFTKAENPKTGESLALPRRLARSARKRLARRKARLNHLKHLIANEFKLNYEDYQSFDESLAKAYKGSLISPYELRFRALNELLSKQDFARVILHIAKRRGYDDIKNSDDKEKGAILKAIKQNEEKLANYQSVGEYLYKEYFQKFKENSKEFTNVRNKKESYERCIAQSFLKDELKLIFKKQREFGFSFSKKFEEEVLSVAFYKRALKDFSHLVGNCSFFTDEKRAPKNSPLAFMFVALTRIINLLNNLKNTEGILYTKDDLNTFLNEVLKNGTLTYKQTKKLLGLSDDYEFKGEKGTYFIEFKKYKEFIKALGDHNLSQDDLNEIAKDITLIKDEIKLKKALAKYDLNQNQIDSLSKLEFKDHLNISFKALKLITPLMLEGKKYDEACNELNLKVAINEDKKDFLPAFNETYYKDEVTNPVVLRAIKEYRKVLNALLKKYGKVHKINIELAREVGKNHSQRAKIEKEQNENYKAKKDAELECEKLGLKINSKNILKLRLFKEQKEFCAYSGEKIKISDLQDEKMLEIDHIYPYSRSFDDSYMNKVLVFTKQNQEKLNKTPFEAFGNDSAKWQKIEVLAKNLPTKKQKRILDKNYKDKEQKDFKDRNLNDTRYIARLVLNYTKDYLDFLPLSDDENTKLNDTQKGSKVHVEAKSGMLTSALRHTWGFSTKDRNNHLHHAIDAVIIAYANNSIVKAFSDFKKEQESNSAELYAKKISELDYKNKRKFFEPFSGFRQKVLDKIDEIFVSKPERKKPSGALHEETFRKEEEFYQSYGGKEGVLKALELGKIRKVNGKIVKNGDMFRVDIFKHKKTNKFYAVPIYTMDFALKVLPNKAVARSKKGEIKDWILMDENYEFCFSLYKDSLILIQTKDMQEPEFVYYNAFTSSTVSLIVSKHDNKFETLSKNQKILFKNANEKEVIAKSIGIQNLKVFEKYIVSALGEVTKAEFRQREDFKK

SEQ ID NO: 356 - protein, 987 aa, Campylobacter jejuni
MARILAFDIGISSIGWAFSENDELKDCGVRIFTKAENPKTGESLALPRRLARSARKRLARRKARLNHLKHLIANEFKLNYEDYQSFDESLAKAYKGSLISPYELRFRALNELLSKQDFARVILHIAKRRGYDDIKNSDDKEKGAILKAIKQNEEKLANYQSVGEYLYKEYFQKFKENSKEFTNVRNKKESYERCIAQSFLKDELKLIFKKQREFGFSFSKKFEEEVLSVAFYKRALKDFSHLVGNCSFFTDEKRAPKNSPLAFMFVALTRIINLLNNLKNTEGILYTKDDLNTLLNEVLKNGTLTYKQTKKLLGLSDDYEFKGEKGTYFIEFKKYKEFIKSLGDHSLSQDDLNEIAKDITLIKDEIKLKKALAKYDLNQNQIDSLSKLEFKDHLNISFKALKLITPLMLEGKKYDEACNELNLKVAINEDKKDFLPAFNETYYKDEVTNPVVLRAIKEYRKVLNALLKKYGKVHKINIELAREVGKNHSQRAKIEKEQNENYKAKKDAELECEKLGLKINSKNILKLRLFKEQKEFCAYSGEKIKISDLQDEKMLEIDHIYPYSRSFDDSYMNKVLVFTKQNQEKLNQTPFEAFGNDSAKWQKIEVLAKNLPTKKQKRILDKNYKDKEQKNFKDRNLNDTRYIARLVLNYTKDYLDFLPLSDDENTKLNDTQKGSKVHVEAKSGMLTSALRHTWGFSAKDRNNHLHHAIDAVIIAYANNSIVKAFSDFKKEQESNSAELYAKKISELDYKNKRKFFEPFSGFRQKVLDKIDEIFVSKPERKKPSGALHEETFRKEEEFYQSYGGKEGVLKALELGKIRKVNGKIVKNGDMFRVDIFKHKKTNKFYAVPIYTMDFALKVLPNKAVARSKKGEIKDWILMDENYEFCFSLYKDSLILIQTKDMQEPEFVYYNAFTSSTVSLIVSKHDNKFETLSKNQKILFKNANEKEVIAKSIGIQNLKVFEKYIVSALGEVTKAEFRQREDFKNELR

SEQ ID NO: 357 - protein, 987 aa, Campylobacter jejuni
MARILAFDIGISSIGWAFSENDELKDCGVRIFTKAENPKTGESLALPRRLARSARKRLARRKARLNHLKHLIANEFKLNYEDYQSFDESLAKAYKGSLISPYELRFRALNELLSKQDFARVILHIAKRRGYDDIKNSDDKEKGAILKAIKQNEEKLANYQSVGEYLYKEYFQKFKENSKEFTNVRNKKESYERCIAQSFLKDELKLIFKKQREFGFSFSKKFEEEVLSVAFYKRALKDFSHLVGNCSFFTDEKRAPKNSPLAFMFVALTRIINLLNNLKNTEGILYTKDDLNALLNEVLKNGTLTYKQTKKLLGLSDDYEFKGEKGTYFIEFKKYKEFIKALGDHSLSQDDLNEIAKDITLIKDEIKLKKALVKYDLNQNQIDSLSKLEFKDHLNISFKALKLITPLMLEGKKYDEACNELNLKVAINEDKKDFLPAFNETYYKDEVTNPVVLRAIKEYRKVLNALLKKYGKVHKINIELAREVGKNYSQRAKIEKEQNENYKAKKDAELECEKLGLKINSKNILKLRLFKEQKEFCAYSGEKIKISDLQDEKMLEIDHIYPYSRSFDDSYMNKVLVFTKQNQEKLNQTPFEAFGNDSAKWQKIEVLAKNLPTKKQKRILDKNYKDKEQKDFKDRNLNDTRYIARLVLNYTKDYLDFLPLSDDENTKLNDTQKGSKVHVEAKSGMLTSALRHTWGFSAKDRNNHLHHAIDAVIIAYANNSIVKAFSDFKKEQESNSAELYAKKISELDYKNKRKFFEPFSGFRQKVLDKIDEIFVSKPERKKPSGALHEETFRKEEEFYQSYGGKEGVLKALELGKIRKVNGKIVKNGDMFRVDIFKHKKTNKFYAVPIYTMDFALKVLPNKAVARSKKGEIKDWILMDENYEFCFSLYKDSLILIQTKDMQEPELVYFNAFTSSTVSLIVSKHDNKFETLSKNQKILFKNANEKEVIAKSIGIQNLKVFEKYIVSALGEVTKAEFRQREDFKNELR

SEQ ID NO: 358 - protein, 983 aa, Campylobacter jejuni; identical to SEQ ID NO: 236

SEQ ID NO: 359 - protein, 987 aa, Campylobacter jejuni
MARILAFDIGISSIGWAFSENDELKDCGVRIFTKAENPKTGESLALPRRLARSARKRLARRKARLNHLKHLIANEFKLNYEDYQSFDESLAKAYKGSLISPYELRFRALNELLSKQDFARVILHIAKRRGYDDIKNSDDKEKGAILKAIKQNEEKLVNYQSVGEYLYKEYFQKFKENSKEFTNVRNKKESYERCIAQSFLKDELKLIFKKQREFGFSFSKKFEEEVLSVAFYKRALKDFSHLVGNCSFFTDEKRAPKNSPLAFMFVALTRIINLLNNLKNTEGILYTKDDLNALLNEVLKNGTLTYKQTKKLLGLSDDYEFKGEKGTYFIEFKKYKEFIKALGDHSLSQDDLNEIAKDITLIKDEIKLKKALAKYDLNQNQIDSLSKLEFKDHLNISFKALKLITPLMLEGKKYDEACNELNLKVAINEDKKDFLPAFNETYYKDEVTNPVVLRAIKEYRKVLNALLKKYGKVHKINIELAREVGKNYSQRAKIEKEQNENYKAKKDAELECEKLGLKINSKNILKLRLFKEQKEFCAYSGEKIKISDLQDEKMLEIDHIYPYSRSFDDSYMNKVLVFTKQNQEKLNQTPFEAFGNDSAKWQKIEVLAKNLPTKKQKRILDKNYKDKEQKDFKDRNLNDTRYIARLVLNYTKDYLDFLPLSDDENTKLNDTQKGSKVHVEAKSGMLTSALRHTWGFSAKDRNNHLHHAIDAVIIAYANNSIVKAFSDFKKEQESNSAELYAKKISELDYKNKRKFFEPFSGFRQKVLDKIDEIFVSKPERKKPSGALHEETFRKEEEFYQSYGGKEGVLKALELGKIRKVNGKIVKNGDMFRVDIFKHKKTNKFYAVPIYTMDFALKVLPNKAVARSEKGEIKDWILMDENYEFCFSLYKDSLILIQTKDMQEPELVYFNAFTSSTVSLIVSKHDNKFETLSKNQKILFKNANEKEVIAKSIGIQNLKVFEKYIVSALGEVTKAEFRQREDFKNELR

SEQ ID NO: 360 - protein, 987 aa, Campylobacter jejuni
MARILAFDIGISSIGWAFSENDELKDCGVRIFTKAENPKTGESLALPRRLARSARKRLARRKARLNHLKHLIANEFKLNYEDYQSFDESLAKAYKGSLISPYELRFRALNELLSKQDFARVILHIAKRRGYDNIKNSDNEEKSEILKAIKQNEEKLVNYQSVGEYLYKEYFQKFKENSKEFINVRNKKESYERCIAQSFLKDELKLIFQKQREFGLSFSKKFEEEVLSVAFYKRALKDFSHLVGNCSFFTDEKRAPKNSPLAFMFVALTRIINLLNNLKNTEGILYTKDDLNTLLNEVLKNGTLTYKQTKKLLGLSDDYEFKGEKGTYFIEFKKYKEFIKALGDHSLSQDDLNEIAKDITLIKDEIKLKKALAKYDLNQNQIDSLSKLEFKDHLNISFKALKLITPLMLEGKKYDEACNELNLKVVINEDKKDFLPAFNETYYKDEVTNPVVLRAIKEYRKVLNALLKKYGKVHKINIELAREVGKNHSQRAKIEKEQNENYKAKKDAELECEKLGLKINNKNILKLRLFKEQKEFCAYSGEKIKLSDLQDEKMLEIDHIYPYSRSFDDSYMNKVLVFTKQNQEKLNKTPFEAFGNDSTKWQKIEVLAKNLPTKKQKRILDKNYKDKEQKDFKDRNLNDTRYIARLVLNYTKDYLDFLPLSDDENTKLNDIQKGSKVHVEAKSGMLTSALRHTWGFSTKDRNNHLHHAIDAVIIAYANNSIVKAFSDFKKEQESNSAELYAKKISELDYKNKRKFFEPFSGFRQKVLDKIDEIFVSKPERKKPSGALHEETFRKEEEFYQSYGGKEGVLKALELGKIRKVNGKIVKNGDMFRVDIFKHKKTNKFYAVPIYTMDFALKVLPNKAVVQGKDKKSGLIKDWILMDENYEFCFSLYKDSLILIQTKDMQEPEFVYYNAFTSSTVSLIVSKHDNKFETLSKNQKILFKNANEKEVIAKSIGIQNLKVFEKYIVSALGEVTKAEFRQREDFKK

SEQ ID NO: 361 - protein, 984 aa, Campylobacter jejuni
MARILAFDIGISSIGWAFSENDELKDCGVRIFTKAENPKTGESLALPRRLARSARKRLARRKARLNHLKHLIANEFKLNYEDYQSFDESLAKAYKGSLISPYELRFRALNELLSKQDFARVILHIVKRRGYDDIKNSDDKEKGAILKAIKQNEEKLANYQSVGEYLYKEYFQKFKENSKEFTNVRNKKESYERCIAQSFLKDELKLIFKKQREFGFSFSKKFEEEVLSVAFYKRALKDFSHLVGNCSFFTDEKRAPKNSPLAFMFVALTRIINLLNNLKNTEGILYTKDDLNTLLNEVLKNGTLTYKQTKKLLGLSDDYEFKGEKGTYFIEFKKYKEFIKALGDHSLSQDDLNEIAKDITLIKDEIKLKKALAKYDLNQNQIDSLSKLEFKDHLNISFKALKLITPLMLEGKKYDEACNELNLKVAINEDKKDFLPAFNETYYKDEVTNPVVLRAIKEYRKVLNALLKKYGKVHKINIELAREVGKNHSQRAKIEKEQNENYKAKKDAEFECEKLGLKINSKNILKLRLFKEQKEFCAYSGEKIKISDLQDEKMLEIDHIYPYSRSFDDSYMNKVLVFTKQNQEKLNKTPFEAFGNDSAKWQKIEVLAKNLPTKKQKRILDKNYKDKEQKDFKDRNLNDTRYIARLVLNYTKDYLDFLPLSDDENTKLNDTQKGSKVHVEAKSGMLTSALRHTWGFSTKDRNNHLHHAIDAVIIAYANNSIVKAFSDFKKEQESNSAELYAKKISELDYKNKRKFFEPFSGFRQKVLDKIDEIFVSKPERKKPSGALHEETFRKEEEFYQSYGGKEGVLKALELGKIRKVNGKIVKNGDMFRVDIFKHKKTNKFYAVPIYTMDFALKVLPNKAVARSKKGEIKDWILMDENYEFCFSLYKDSLILIQTKDMQEPEFVYYNAFTSSTVSLIVSKHDNKFETLSKNQKILFKNANEKEVIAKSIGIQNLKVFEKYIVSALGEVTKAEFRQREDFKK

SEQ ID NO: 362 - protein, 984 aa, Campylobacter jejuni
MARILAFDIGISSIGWAFSENDELKDCGVRIFTKAENPKTGESLALPRRLARSARKRLARRKARLNHLKHLIANEFKLNYEDYQSFDESLAKAYKGSLISPYELRFRALNELLSKQDFARVILHIVKRRGYDDIKNSDDKEKGTILKAIKQNEEKLANYQSVGEYLYKEYFQKFKENSKEFTNVRNKKESYERCIAQSFLKDELKLIFKKQREFGFSFSKKFEEEVLSVAFYKRALKDFSHLVGNCSFFTDEKRAPKNSPLAFMFVALTRIINLLNNLKNTEGILYTKDDLNTLLNEVLKNGTLTYKQTKKLLGLSDDYEFKGEKGTYFIEFKKYKEFIKALGEHNLSQDDLNEIAKDITLIKDEIKLKKALAKYDLNQNQIDSLSKLEFKDHLNISFKALKLITPLMLEGKKYDEACNELNLKVAINEDKKDFLPAFNETYYKDEVTNPVVLRAIKEYRKVLNALLKKYGKVHKINIELAREVGKNYSQRAKIEKEQNENYKAKKDAELECEKLGLKINSKNILKLRLFKEQKEFCAYSGEKIKISDLQDEKMLEIDHIYPYSRSFDDSYMNKVLVFTKQNQEKLNQTPFEAFGNDSAKWQKIEVLAKNLPTKKQKRILDKNYKDKEQKDFKDRNLNDTRYIARLVLNYTKDYLDFLPLSDDENTKLNDTQKGSKVHVEAKSGMLTSALRHTWGFSAKDRNNHLHHAIDAVIIAYANNSIVKAFSDFKKEQESNSAELYAKKISELDYKNKRKFFEPFSGFRQKVLDKIDEIFVSKPERKKPSGALHEETFRKEEEFYQSYGGKEGVLKALELGKIRKVNGKIVKNGDMFRVDIFKHKKTNKFYAVPIYTMDFALKVLPNKAVARSKKGEIKDWILMDENYEFCFSLYKDSLILIQTKDMQEPEFVYYNAFTSSTVSLIVSKHDNKFETLSKNQKILFKNANEKEVIAKSIGIQNLKVFEKYIVSALGEVTKAEFRQREDFKK

SEQ ID NO: 363 - protein, 987 aa, Campylobacter jejuni
MARILAFDIGISSIGWAFSENDELKDCGVRIFTKAENPKTGESLALPRRLARSARKRLARRKARLNHLKHLIANEFKLNYEDYQSFNESLAKAYKGSLISPYELRFRALNELLSKQDFARVILHIAKRRGYDDIKNSDDKEKGAILKVIKQNEEKLANYQSVGEYLYKEYFQKFKENSKEFTNVRNKKESYERCIAQSFLKDELKLIFQKQREFGFSFSKKFEEEVLSVAFYKRALKDFSHLVGNCSFFTDEKRAPKNSPLAFMFVALTRIINLLNNLKNTEGILYTKDDLNALLNEVLKNGTLTYKQTKKLLGLSDDYEFKGEKGTYFIEFKKYKEFIKALGDHSLSQDDLNEIAKDITLIKDEIKLKKALAKYDLNQNQIDSLSKLEFKDHLNISFKALKLITPLMLEGKKYDEACNELNLKVAINEDKKDFLPAFNETYYKDEVTNPVVLRAIKEYRKVLNALLKKYGKVHKINIELAREVGKNYSQRAKIEKEQNENYKAKKDAELECEKLGLKINSKNILKLRLFKEQKEFCAYSGEKIKISDLQDEKMLEIDHIYPYSRSFDDSYMNKVLVFTKQNQEKLNQTPFEAFGNDSAKWQKIEVLAKNLPTKKQKRILDKNYKDKEQKDFKDRNLNDTRYIARLVLNYTKDYLDFLPLSDDENTKLNDTQKGSKVHVEAKSGMLTSALRHTWGFSAKDRNNHLHHAIDAVIIAYANNSIVKAFSDFKKEQESNSAELYAKKISELDYKNKRKFFEPFSGFRQKVLDKIDEIFVSKPERKKPSGALHEETFRKEEEFYQSYGGKEGVLKALELGKIRKVNGKIVKNGDMFRVDIFKHKKTNKFYAVPIYTMDFALKVLPNKAVARSKKGEIKDWILMDENYEFCFSLYKDSLILIQTKDMQEPELVYFNAFTSSTVSLIVSKHDNKFETLSKNQKILFKNANEKEVIAKSIGIQNLKVFEKYIVSALGEVTKAEFRQREDFKNELR

SEQ ID NO: 364 - protein, 984 aa, Campylobacter jejuni
MARILAFDIGISSIGWAFSENDELKDCGVRIFTKAENPKTGESLALPRRLARSARKRLARRKARLNRLKHLIANEFKLNYEDYQSFDESLAKAYKGSLISPYELRFRALNELLSKQDFARVILHIAKRRGYDDIKNSDDKEKGAILKAIKQNEEKLANYQSVGEYLYKEYFQKFKENSKEFTNVRNKKESYERCIAQSFLKDELKLIFKKQREFGFSFSKKFEEEVLSVAFYKRALKDFSHLVGNCSFFTDEKRAPKNSPLAFMFVALTRIINLLNNLKNTEGILYTKDDLNALLNEVLKNGTLTYKQTKKLLGLSDDYEFKGEKGTYFIEFKKYKEFIKALGDHSLNQDDLNEIAKDITLIKDEIKLKKALAKYDLNQNQIDSLSKLEFKDHLNISFKALKLITPLMLEGKKYDEACNELNLKVAINEDKKDFLPAFNETYYKDEVTNPVVLRAIKEYRKVLNALLKKYGKVHKINIELAREVGKNYSQRAKIEKEQNENYKAKKDAELECEKLGLKINSKNILKLRLFKEQKEFCVYSGEKIKISDLQDEKMLEIDHIYPYSRSFDDSYMNKVLVFTKQNQEKLNQTPFEAFGNDSAKWQKIEVLAKNLPTKKQKRILDKNYKDKEQKDFKDRNLNDTRYIARLVLNYTKDYLDFLPLSDDENTKLNDTQKGSKVYVEAKSGMLTSALRHTWGFSTKDRNNHLHHAIDAVIIAYANNSIVKAFSDFKKEQESNSAELYAKKISELDYKNKRKFFEPFSGFRQKVLDKIDEIFVSKPERKKPSGALHEETFRKEEEFYQSYGGKEGVLKALELGKIRKVNGKIVKNGDMFRVDIFKHKKTNKFYAVPIYTMDFALKVLPNKAVARSKKGEIKDWILMDENYEFCFSLYKDSLILIQTKDMQEPEFVYYNAFTSSTVSLIVSKHDNKFETLSKNQKILFKNANEKEVIAKSIGIQNLKVFEKYIVSALGEVTKAEFRQREDFKK

SEQ ID NO: 365 - protein, 984 aa, Campylobacter jejuni
MARILAFDIGISSIGWAFSENDELKDCGVRIFTKVENPKTGESLALPRRLARSARKRLARRKARLNHLKHLIANEFKLNYEDYQSFDESLAKAYKGSLISPYELRFRALNELLSKQDFARVILHIAKRRGYDDIKNSDDKEKGAILKAIKQNEEKLANYQSVGEYLYKEYFQKFKENSKEFTNVRNKKESYERCIAQSFLKDELKLIFKKQREFGFSFLKKFEEEVLSVAFYKRALKDFSHLVGNCSFFTDEKRAPKNSPLAFMFVALTRIINLLNNLKNTEGILYTKDDLNALLNEVLKNGTLTYKQTKKLLGLSDDYEFKGEKGTYFIEFKKYKEFIKALGEHNLSQDDLNEIAKDITLIKDEIKLKKALAKYDLNQNQIDSLSKLEFKDHLNISFKALKLITPLMLEGKKYDEAYNELNLKVAINEDKKDFLPAFNETYYKDEVTNPVVLRAIKEYRKVLNALLKKYGKVHKINIELAREVGKNHSQRAKIEKEQNENYKAKKDAELECEKLGLKINSKNILKLRLFKEQKEFCAYSGEKIKISDLQDEKMLEIDHIYPYSRSFDDSYMNKVLVFTKQNQEKLNQTPFEAFGNDSAKWQKIEVLAKNLPTKKQKRILDKNYKDKEQKDFKDRNLNDTRYIARLVLNYTKDYLDFLPLSDDENTKLNDTQKGSKVHVEAKSGMLTSALRHTWGFSAKDRNNHLHHAIDAVIIAYANNSIVKAFSDFKKEQESNSAELYAKKISELDYKNKRKFFEPFSGFRQKVLDKIDEIFVSKPERKKPSGALHEETFRKEEEFYQSYGGKEGVLKALELGKIRKVNGKIVKNGDMFRVDIFKHKKTNKFYAVPIYTMDFALKVLPNKAVARSKKGEIKDWILMDENYEFCFSLYKDSLILIQTKDMQEPELVYFNAFTSSTVSLIVSKHDNKFETLSKNQKILFKNANEKEVIAKSIGIQNLKVFEKYIVSALGEVTKAEFRQREDFKK

SEQ ID NO: 366 - protein, 984 aa, Campylobacter jejuni
MARILAFDIGISSIGWAFSENDELKDCGVRIFTKVENPKTGESLALPRRLARSARKRLARRKARLNHLKHLIANEFKLNYEDYQSFDESLAKAYKGSLISPYELRFRALNELLSKQDFARVILHIAKRRGYDDIKNSDDKEKGAILKAIKQNEEKLANYQSVGEYLYKEYFQKFKENSKEFTNVRNKKESYERCIAQSFLKDELKLIFKKQREFGFSFSKKFEEEVLSVAFYKRALKDFSHLVGNCSFFTDEKRAPKNSPLAFMFVALTRIINLLNNLKNTEGILYTKDDLNALLNEVLKNGTLTYKQTKKLLGLSDDYEFKGEKGTYFIEFKKYKEFIKALGEHNLSQDDLNEIAKDITLIKDEIKLKKALAKYDLNQNQIDSLSKLEFKDHLNISFKALKLITPLMLEGKKYDEACNELNLKVAINEDKKDFLPAFNETYYKDEVTNPVVLRAIKEYRKVLNALLKKYGKVHKINIELAREVGKNHSQRAKIEKEQNENYKAKKDAELECEKLGLKINSKNILKLRLFKEQKEFCAYSGEKIKISDLQDEKMLEIDHIYPYSRSFDDSYMNKVLVFTKQNQEKLNKTPFEAFGNDSAKWQKIEVLAKNLPTKKQKRILDKNYKDKEQKDFKDRNLNDTRYIARLVLNYTKDYLDFLPLSNDENTKLNDTQKGSKVHVEAKSGMLTSALRHTWGFSTKDRNNHLHHAIDAVIIAYANNSIVKAFSDFKKEQESNSAELYAKKISELDYKNKRKFFEPFSGFRQKVLDKIDEIFVSKPERKKPSGALHEETFRKEEEFYQSYGGKEGVLKALELGKIRKVNGKIVKNGDMFRVDIFKHKKTNKFYAVPIYTMDFALKVLPNKAVARSKKGEIKDWILMDENYEFCFSLYKDSLILIQTKDMQEPEFVYYNAFTSSTVSLIVSKHDNKFETLSKNQKILFKNANEKEVIAKSIGIQNLKVFEKYIVSALGEVTKAEFRQREDFKK

SEQ ID NO: 367 - protein, 984 aa, Campylobacter jejuni
MARILAFDIGISSIGWAFSENDELKDCGVRIFTKVENPKTGESLALPRRLARSARKRLARRKARLNHLKHLIANEFKLNYEDYQSFDESLAKAYKGSLISPYELRFRALNELLSKQDFARVILHIAKRRGYDDIKNSDDKEKGAILKAIKQNEEKLANYQSVGEYLYKEYFQKFKENSKEFTNVRNKKESYERCIAQSFLKDELKLIFKKQREFGFSFSKKFEEEVLSVAFYKRALKDFSHLVGNCSFFTDEKRAPKNSPLAFMFVALTRIINLLNNLKNTEGILYTKDDLNALLNEVLKNGTLTYKQTKKLLGLSDDYEFKGEKGTYFIEFKKYKEFIKALGEHNLSQDDLNEIAKDITLIKDEIKLKKALAKYDLNQNQIDSLSKLEFKDHLNISFKALKLITPLMLEGKKYDEACNELNLKVAINEDKKDFLPAFNETYYKDEVTNPVVLRAIKEYRKVLNALLKKYGKVHKINIELAREVGKNHSQRAKIEKEQNENYKAKKDAELECEKLGLKINSKNILKLRLFKEQKEFCAYSGEKIKISDLQDEKMLEIDHIYPYSRSFDDSYMNKVLVFTKQNQEKLNKTPFEAFGNDSAKWQKIEVLAKNLPTKKQKRILDKNYKDKEQKDFKDRNLNDTRYIARLVLNYTKDYLDFLPLSDDENTKLNDTQKGSKVHVEAKSGMLTSALRHTWGFSTKDRNNHLHHAIDAVIIAYANNSIVKAFSDFKKEQESNSAELYAKKISELDYKNKRKFFEPFSGFRQKVLDKIDEIFVSKPERKKPSGALHEETFRKEEEFYQSYGGKEGVLKALELGKIRKVNGKIVKNGDMFRVDIFKHKKTNKFYAVPIYTMDFALKVLPNKAVARSKKGEIKDWILMDENYEFCFSLYKDSLILIQTKDMQEPEFVYYNAFTSSTVSLIVSKHDNKFETLSKNQKILFKNANEKEVIAKSIGIQNLKVFEKYIVSALGEVTKAEFRQREDFKK

SEQ ID NO: 368 - protein, 984 aa, Campylobacter jejuni
MARILAFDIGISSIGWAFSENDELKDCGVRIFTKVENPKTGESLALPRRLARSARKRLARRKARLNHLKHLIANEFKLNYEDYQSFDESLAKAYKGSLISPYELRFRALNELLSKQDFARVILHIAKRRGYDDIKNSDDKEKGAILKAIKQNEEKLANYQSVGEYLYKEYFQKFKENSKEFTNVRNKKESYERCIAQSFLKDELKLIFKKQREFGFSFSKKFEEEVLSVAFYKRALKDFSHLVGNCSFFTDEKRAPKNSPLAFMFVTLTRIINLLNNLKNTEGILYTKDDLNALLNEVLKNGTLTYKQTKKLLGLSDDYEFKGEKGTYFIEFKKYKEFIKALGEHNLSQDDLNEIAKDITLIKDEIKLKKALAKYDLNQNQIDSLSKLEFKDHLNISFKALKLITPLMLEGKKYDEACNELNLKVAINEDKKDFLPAFNETYYKDEVTNPVVLRAIKEYRKVLNALLKKYGKVHKINIELAREVGKNHSQRAKIEKEQNENYKAKKDAELECEKLGLKINSKNILKLRLFKEQKEFCAYSGEKIKISDLQDEKMLEIDHIYPYSRSFDDSYMNKVLVFTKQNQEKLNKTPFEAFGNDSAKWQKIEVLAKNLPTKKQKRILDKNYKDKEQKDFKDRNLNDTRYIARLVLNYTKDYLDFLPLSDDENTKLNDTQKGSKVHVEAKSGMLTSALRHTWGFSTKDRNNHLHHAIDAVIIAYANNSIVKAFSDFKKEQESNSAELYAKKISELDYKNKRKFFEPFSGFRQKVLDKIDEIFVSKPERKKPSGALHEETFRKEEEFYQSYGGKEGVLKALELGKIRKVNGKIVKNGDMFRVDIFKHKKTNKFYAVPIYTMDFALKVLPNKAVARSKKGEIKDWILMDENYEFCFSLYKDSLILIQTKDMQEPEFVYYNAFTSSTVSLIVSKHDNKFETLSKNQKILFKNANEKEVIAKSIGIQNLKVFEKYIVSALGEVTKAEFRQREDFKK

SEQ ID NO: 369 - protein, 984 aa, Campylobacter jejuni
MARILAFDIGISSIGWAFSENDELKDCGVRIFTKVENPKTGESLALPRRLARSARKRLARRKARLNHLKHLIANEFKLNYEDYQSFDESLAKAYKGSLISPYELRFRALNELLSKQDFARVILHIAKRRGYDDIKNSDDKEKGAILKAIKQNEEKLANYQSVGEYLYKEYFQKFKENSKEFTNVRNKKESYERCIAQSFLKDELKLIFKKQREFGFSFSKKFEEEVLSVAFYKRALKDFSHLVGNCSFFTDEKRAPKNSPLAFMFVALTRIINLLNNLKNTEGILYTKDDLNALLNEVLKNGTLTYKQTKKLLGLSDDYEFKGEKGTYFIEFKKYKEFIKALGEHNLSQDDLNEIAKDITLIKDEIKLKKALAKYDLNQNQIDSLSKLEFKDHLNISFKALKLITPLMLEGKKYDEACNELNLKVAINEDKKDFLPAFNETYYKDEVTNPVVLRAIKEYRKVLNALLKKYGKVHKINIELAREVGKNHSQRAKIEKEQNENYKAKKDAELECEKLGLKINSKNILKLRLFKEQKEFCAYSGEKIKISDLQDEKMLEIDHIYPYSRSFDDSYMNKVLVFTKQNQEKLNKTPFEAFGNDSAKWQKIEVLAKNLPTKKQKRILDKNYKDKEQKDFKDRNLNDTRYIARLVLNYTKDYLDFLPLSDDENTKLNDTQKGSKVHVEAKSGMLTSALRHTWGFSTKDRNNHLHHAIDAVIIAYANNSIVKAFSDFKKEQESNSAELYAKKISELDYKNKRKFFEPFSGFRQKVLDKIDEIFVSKPERKKPSGALHEETFRKEEEFYQSYGGKEGVLKALELGKIRKVNGKIVKNGDMFRVDIFKHKKTNKFYAVPIYTMDFALKVLPNKAVARSKKGEIKDWILMDENYEFCFSLYKDSLILIQTKDMQEPEFVYYNAFTSSTVSLIVSKHDNKFETLSKNQKILFKNANEKEVIAKSIGIQNLKVFEKYIVSALGEVTKAEFIQREDFKK

SEQ ID NO: 370 - protein, 987 aa, Campylobacter jejuni
MARILAFDIGISSIGWAFSENDELKDCGVRIFTKVENPKTGESLALPRRLARSARKRLARRKARLNHLKHLIANEFKLNYEDYQSFDESLAKAYKGSLISPYELRFRALNELLSKQDFARVILHIAKRRGYDDIKNSDDKEKGAILKAIKQNEEKLANYQSVGEYLYKEYFQKFKENSKEFTNVRNKKESYERCIAQSFLKDELKLIFKKQREFGFSFSKKFEEEVLSVAFYKRALKDFSHLVGNCSFFTDEKRVPKNSPLAFMFVALTRIINLLNNLKNTEGILYTKDDLNALLNEVLKNGTLTYKQTKKLLGLSDDYEFKGEKGTYFIEFKKYKEFIKALGEHNLSQDDLNEIAKDITLIKDEIKLKKALAKYDLNQNQIDSLSKLEFKDHLNISFKALKLITPLMLEGKKYDEACNELNLKVAINEDKKDFLPAFNETYYKDEVTNPVVLRAIKEYRKVLNALLKKYGKVHKINIELAREVGKNHSQRAKIEKEQNENYKAKKDAELECEKLGLKINSKNILKLRLFKEQKEFCAYSGEKIKISDLQDEKMLEIDHIYPYSRSFDDSYMNKVLVFTKQNQEKLNQTPFEAFGNDSAKWQKIEVLAKNLPTKKQKRILDKNYKDKEQKNFKDRNLNDTRYIARLVLNYTKDYLDFLPLSDDENTKLNDTQKGSKVHVEAKSGMLTSALRHTWGFSAKDRNNHLHHAIDAVIIAYANNSIVKAFSDFKKEQESNSAELYAKKISELDYKNKRKFFEPFSGFRQKVLDKIDEIFVSKPERKKPSGALHEETFRKEEEFYQSYGGKEGVLKALELGKIRKVNGKIVKNGDMFRVDIFKHKKTNKFYGVPIYTMDFALKVLPNKAVARSKKGEIKDWILMDENYEFCFSLYKDSLILIQTKDMQEPEFVYYNAFTSSTVSLIVSKHDNKFETLSKNQKILFKNANEKEVIAKSIGIQNLKVFEKYIVSALGEVTKAEFRQREDFKNELR

SEQ ID NO: 371 - protein, 984 aa, Campylobacter jejuni
MARILAFDIGISSIGWAFSENDELKDCGVRIFTKVENPKTGESLALPRRLARSARKRLARRKVRLNHLKHLIANEFKLNYEDYQSFDESLAKAYKGSLISPYELRFRALNELLSKQDFARVILHIAKRRGYDDIKNSDDKEKGAILKAIKQNEEKLANYQSVGEYLYKEYFQKFKENSKEFTNVRNKKESYERCIAQSFLKDELKLIFKKQREFGFSFSKKFEEEVLSVAFYKRALKDFSHLVGNCSFFTDEKRAPKNSPLAFMFVALTRIINLLNNLKNTEGILYTKDDLNALLNEVLKNGTLTYKQTKKLLGLSDDYEFKGEKGTYFIEFKKYKEFIKALGEHNLSQDDLNEIAKDITLIKDEIKLKKALAKYDLNQNQIDSLSKLEFKDHLNISFKALKLITPLMLEGKKYDEACNELNLKVAINEDKKDFLPAFNETYYKDEVTNPVVLRAIKEYRKVLNALLKKYGKVHKINIELAREVGKNHSQRAKIEKEQNENYKAKKDAELECEKLGLKINSKNILKLRLFKEQKEFCAYSGEKIKISDLQDEKMLEIDHIYPYSRSFDDSYMNKVLVFTKQNQEKLNKTPFEAFGNDSAKWQKIEVLAKNLPTKKQKRILDKNYKDKEQKDFKDRNLNDTRYIARLVLNYTKDYLDFLPLSDDENTKLNDTQKGSKVHVEAKSGMLTSALRHTWGFSTKDRNNHLHHAIDAVIIAYANNSIVKAFSDFKKEQESNSAELYAKKISELDYKNKRKFFEPFSGFRQKVLDKIDEIFVSKPERKKPSGALHEETFRKEEEFYQSYGGKEGVLKALELGKIRKVNGKIVKNGDMFRVDIFKHKKTNKFYAVPIYTMDFALKVLPNKAVARSKKGEIKDWILMDENYEFCFSLYKDSLILIQTKDMQEPEFVYYNAFTSSTVSLIVSKHDNKFETLSKNQKILFKNANEKEVIAKSIGIQNLKVFEKYIVSALGEVTKAEFRQREDFKK

SEQ ID NO: 372 - protein, 721 aa, Campylobacter jejuni
MFVALTRIINLLNNLKNTEGILYTKDDLNTLLNEVLKNGTLTYKQTKKLLGLSDDYEFKGEKGTYFIEFKKYKEFIKALGDHSLSQDDLNEIAKDITLIKDEIKLKKALAKYDLNQNQIDSLSKLEFKDHLNISFKALKLITPLMLEGKKYDEACNELNLKVAINEDKKDFLPAFNETYYKDEVTNPVVLRAIKEYRKVLNALLKKYGKVHKINIELAREVGKNYSQRAKIEKEQNENYKAKKDAELECEKLGLKINSKNILKLRLFKEQKEFCAYSGEKIKISDLQDEKMLEIDHIYPYSRSFDDSYMNKVLVFTKQNQEKLNQTPFEAFGNDSAKWQKIEVLAKNLPTKKQKRILDKNYKDKEQKDFKDRNLNDTRYIARLVLNYTKDYLDFLPLSDDENTKLNNTQKGSKVYVEAKSGMLTSALRHTWGFSTKDRNNHLHHAIDAVIIAYANNSIVKAFSDFKKEQESNSAELYAKKISELDYKNKRKFFEPFSGFRQKVLDKIDEIFVSKPERKKPSGALHEETFRKEEEFYQSYGGKEGVLKALELGKIRKVNGKIVKNGDMFRVDIFKHKKTNKFYAVPIYTMDFALKVLPNKAVARSKKGEIKDWILMDENYEFCFSLYKDSLILIQTKDMQEPEFVYYNAFTSSTVSLIVSKHDNKFETLSKNQKILFKNANEKEVIAKSIGIQNLKVFEKYIVSALGEVTKAEFRQREDFKK

SEQ ID NO: 373 - protein, 512 aa, Campylobacter jejuni
MHKINIELAREVGKNHSQRAKIEKEQNENYKAKKDAEIECEKLGLKINSKNILKLRLFKEQKEFCAYSGEKIKLSDLQDEKMLEIDHIYPYSRSFDDSYMNKVLVFTKQNQEKLNKTPFEAFGNDSTKWQKIEVLAKNLPEKKQKRILDKNYKDKEQKDFKDRNLNDTRYIARLVLNYTKDYLDFLPLSDDENTKLNDTQKGSKVHVEAKSGMLTSALRHTWGFSAKDRNNHLHHAIDAAIIAYANNSIVKAFSDFKKEQESNSVELYAKKISELDYKNKRKFFEPFSGFRQKVLDKIDEIFVSKPERKKPSGALHEETFRKEEEFYQSYGGKEGVLKALELGKIRKVNGKIVKNGDMFRVDIFKHKKTNKFYAVPIYTMDFALKVLPNKAVARSKKGEIKDWILMDENYEFCFSLYKDSLILIQTKDMQEPELVYFNAFTSSTVSLIVSKHDNKFETLSKNQKILFKNANEKEVIAKSIGIQNLKVFEKYIVSALGEVTKAEFRQREDFKK

SEQ ID NO: 374 - protein, 965 aa, Campylobacter jejuni
MKIIGFNLGIANIGWALRENDEIIDCGVRVFDIPENPKNGNSLALERRENKARMKIVKRKKARMLATKTFLKKELNVDLSKLFLIGSTQSIYELRAKALSSLISKEELSAIILHIAKHRGYDDSALKNENGTIIEALNKNKETMLKFKSVGEYFYKNFVQNKEVKKIRNTTEDYSNSVPRSLLKQELDLILDKQKELGLIKNADFKEKLFEIIFFKRPLKDFSNKIGNCIFFENEKRAAKNTISACEFVALGKVVNLLKSIEKDIGIVYEKDSINEIMSIILDKTSISYKKIRDILNLPQEINFKGLDYSKNNVENSKLVDLKKLNEFKKALGDGFANLDKDILDSIATDITLTKDTATLKEKLKNYNVLNAEQIEKLSELVFNDHINLSLKALKQIIPLMYEGKRYDEACELCNFTIAKNQEKSEYLPLFEKTRFAKDISSPVVIRAICEFRKLLNDIIRRYGSVHKIHLELTRDFGISFSDRKKIIKEIEQNEQSRIKALETIKELKLEETSKNIQIVRLFEDQKGICPYSGLKMDLNRLDELVIDYIRPYNRSLDDSYSNKVLTFKKLSDLKQGKTPFEAFGEDEKLWAEINERIKEYNGKKRFKIFDKFFKDKKPFDFTEQTLQDTRWLTKLVASYLNEYLSFLPISEDENTALGYGEKGSKQHVILSSGMITQMLRNFWYLGFKNHKDYKNNAMDAIIVAFTTNSIIFAFNNFKKELDLAKAEFYANKISESDYLLKRKFLPPFSGFKEQALEKVKNIFVSHSLKIKNKGTLHDLTPLKIKELKNTYGDLDLAVKLGKIRKYNDKYYANANGSLVRADLFVDKKNKFHAVSIYKADFSTKKLPNKTPATTSNGETKEGIEMNENYNFCMSLYKNTPISVKIKGMKEPIICYYHGFNTSGSKITYKKHDNNYHNLSEDEMVVFRKNDKESIAVGKILEIKKYSISPSGELSLIENEERKWF

SEQ ID NO: 375 - protein, 759 aa, Campylobacter jejuni
MLSVAFYKRALKDFSHLVGNCSFFTDEKRAPKNSPLAFMFVALTRIINLLNNLKNTEGILYTKDDLNALLNEVLKNGTLTYKQTKKLLGLSDDYEFKGEKGTYFIEFKKYKEFIKALGEHNLSQDDLNEIAKDITLIKDEIKLKKALAKYDLNQNQIDSLSKLEFKDHLNISFKALKLITPLMLEGKKYDEACNELNLKVAINEDKKDFLPAFNETYYKDEVTNPVVLRAIKEYRKVLNALLKKYGKVHKINIELAREVGKNHSQRAKIEKEQNENYKAKKDAELECEKLGLKINSKNILKLRLFKEQKEFCAYSGEKIKISDLQDEKMLEIDHIYPYSRSFDDSYMNKVLVFTKQNQEKLNKTPFEAFGNDSAKWQKIEVLAKNLPTKKQKRILDKNYKDKEQKDFKDRNLNDTRYIARLVLNYTKDYLDFLPLSDDENTKLNDTQKGSKVHVEAKSGMLTSALRHTWGFSTKDRNNHLHHAIDAVIIAYANNSIVKAFSDFKKEQESNSAELYAKKISELDYKNKRKFFESFSGFRQKVLDKIDEIFVSKPERKKPSGALHEETFRKEEEFYQSYGGKEGVLKALELGKIRKVNGKIVKNGDMFRVDIFKHKKTNKFYAVPIYTMDFALKVLPNKAVARSKKGEIKDWILMDENYEFCFSLYKDSLILIQTKDMQEPEFVYYNAFTSSTVSLIVSKHDNKFETLSKNQKILFKNANEKEVIAKSIGIQNLKVFEKYIVSALGEVTKAEFRQREDFKK

SEQ ID NO: 376 - protein, 984 aa, Campylobacter jejuni
MVRILAFDIGISSIGWAFSENDELKDCGVRIFTKVENPKTGESLALPRRLARSARKRLARRKARLNHLKHLIANEFKLNYEDYQSFDESLAKAYKGSLISPYELRFRALNELLSKQDFARVILHIAKRRGYDDIKNSDDKEKGAILKAIKQNEEKLANYQSVGEYLYKEYFQKFKENSKEFTNVRNKKESYERCIAQSFLKDELKLIFKKQREFGFSFSKKFEEEVLSVAFYKRALKDFSHLVGNCSFFTDEKRAPKNSPLAFMFVALTRIINLLNNLKNTEGILYTKDDLNALLNEVLKNGTLTYKQTKKLLGLSDDYEFKGEKGTYFIEFKKYKEFIKALGEHNLSQDDLNEIAKDITLIKDEIKLKKALAKYDLNQNQIDSLSKLEFKDHLNISFKALKLITPLMLEGKKYDEACNELNLKVAINEDKKDFLPAFNETYYKDEVTNPVVLRAIKEYRKVLNALLKKYGKVHKINIELAREVGKNHSQRAKIEKEQNENYKAKKDAELECEKLGLKINSKNILKLRLFKEQKEFCAYSGEKIKISDLQDEKMLEIDHIYPYSRSFDDSYMNKVLVFTKQNQEKLNKTPFEAFGNDSAKWQKIEVLAKNLPTKKQKRILDKNYKDKEQKDFKDRNLNDTRYIARLVLNYTKDYLDFLPLSDDENTKLNDTQKGSKVHVEAKSGMLTSALRHTWGFSTKDRNNHLHHAIDAVIIAYANNSIVKAFSDFKKEQESNSAELYAKKISELDYKNKRKFFEPFSGFRQKVLDKIDEIFVSKPERKKPSGALHEETFRKEEEFYQSYGGKEGVLKALELGKIRKVNGKIVKNGDMFRVDIFKHKKTNKFYAVPIYTMDFALKVLPNKAVARSKKGEIKDWILMDENYEFCFSLYKDSLILIQTKDMQEPEFVYYNAFTSSTVSLIVSKHDNKFETLSKNQKILFKNANEKEVIAKSIGIQNLKVFEKYIVSALGEVTKAEFRQREDFKK

SEQ ID NO: 377 - protein, 1003 aa, Campylobacter lari]
MRILGFDIGINSIGWAFVENDELKDCGVRIFTKAENPKNKESLALPRRNARSSRRRLKRRKARLIAIKRILAKELKLNYKDYVAADGELPKAYEGSLASVYELRYKALTQNLETKDLARVILHIAKHRGYMNKNEKKSNDAKKGKILSALKNNALKLENYQSVGEYFYKEFFQKYKKNTKNFIKIRNTKDNYNNCVLSSDLEKELKLILEKQKEFGYNYSEDFINEILKVAFFQRPLKDFSHLVGACTFFEEEKRACKNSYSAWEFVALTKIINEIKSLEKISGEIVPTQTINEVLNLILDKGSITYKKFRSCINLHESISFKSLKYDKENAENAKLIDFRKLVEFKKALGVHSLSRQELDQISTHITLIKDNVKLKTVLEKYNLSNEQINNLLEIEFNDYINLSFKALGMILPLMREGKRYDEACEIANLKPKTVDEKKDFLPAFCDSIFAHELSNPVVNRAISEYRKVLNALLKKYGKVHKIHLELARDVGLSKKAREKIEKEQKENQAVNAWALKECENIGLKASAKNILKLKLWKEQKEICIYSGNKISIEHLKDEKALEVDHIYPYSRSFDDSFINKVLVFTKENQEKLNKTPFEAFGKNIEKWSKIQTLAQNLPYKKKNKILDENFKDKQQEDFISRNLNDTRYIATLIAKYTKEYLNFLLLSENENANLKSGEKGSKIHVQTISGMLTSVLRHTWGFDKKDRNNHLHHALDAIIVAYSTNSIIKAFSDFRKNQELLKARFYAKELTSDNYKHQVKFFEPFKSFREKILSKIDEIFVSKPPRKRARRALHKDTFHSENKIIDKCSYNSKEGLQIALSCGRVRKIGTKYVENDTIVRVDIFKKQNKFYAIPIYAMDFALGILPNKIVITGKDKNNNPKQWQTIDESYEFCFSLYKNDLILLQKKNMQEPEFAYYNDFSISTSSICVEKHDNKFENLTSNQKLLFSNAKEGSVKVESLGIQNLKVFEKYIITPLGDKIKADFQPRENISLKTSKKYGLR

SEQ ID NO: 378 - protein, 372 aa, candidate division
DNESAINQIAYILTTQKADEGIRAELDSLPLSDKAKKAIVKIKPTNFKAFGHLSIKALQKITPHILEGMTYDKACEAAGYDFKKQSASLEQITNPVVKRAITQTLKVVRAIERKYGKPYFIKVETARDLAKNFKDRNAIKKENEENQGYNEDIKSIITNGYEASPKTKGGKQLLNHLKEFNVRLNKNADFNGQQIIKVKLYREQQGKCLYSGNPIDFETMLRDDNAYQVDHIVPFSRSNNDGITNKVLVFTEENQKKADRTPFEYFGTDERRWEKFVALVETTYKTRDVKTSDKATNAINYEYNGYAMKKKQNLLLQDYKNDSWNVRALNDTRYITRFIQNYLRQNVDFAEGEEKQRIIAPNGTTTAYLRKR

SEQ ID NO: 379 - protein, 1117 aa, Capnocytophaga ochracea
MKHILGLDLGSNSIGWAFVQQDFENKQGKIIATGSRIIPMDQGILGDFERGNTVSQTAERTTYRSMRRLRERHLLRRERLHRVLHLLGFLPPHYDAQIDFTKRYGKFIDNAEPKIAYNNGNFIFMNSFNEMVEDFKKHQPQLFYKKSNGEESRIPYDWTIYYLRKKALSQKITQQELAWLILHFNQKRGYYQLRGEEETENPNKEVAFHSLKVVDVEAEAPNKKGEIWYTIRLENGWIYRRTSKNPLDDWKGKTRDFIVTTDLNDDGTIKLDKEGKEKRSFRAPDENDWNLLKKKTEHDIDFSGKPVGTYIYDHLLQNPNQKIKGKLVRTIERKYYKDELKAILAKQIALQPELFTETLLADCIRELYRKNETQQQNLLSKDFLHLFVEDIIFYQRPLCSKKSTIANCTLEKRSYIDKETNERKDAPIKVCAKSNPYYQEFRVLQWLQNLRIYEIETDREVTAEFIETPQDYEALFNFLMSQKEIDNEGLLKYFLFAKNPQIKDKAAKSELKKWLTTYRWNYVYDAADNSSKKYPMNETGYELQRYLQKVEGLPANFLTFDITYQLWHLLYSVKDKVEFEKALKKFAKKKQLDKTSFVDSFKNFKPYPNEYGSFSEKAIKKLLPLMRFGNHWDFNRIDVSTQKRIDDLINGVANEDIRTIIREKAEKYQLNSETCFQDLPLWLAQYVVYNRHAEATDIEKWTSVSDLEAYLEDFKQHSLRNPIVEQVVTETLRVVRDIWQQYSGGQANFFDEIHIELGRELKKTAEERKQLSDKNQENENTNLRIKKLLAELKEDASIQNVRPYSLVQQELLKIYEEGVFSSTDEIEEDIQKIRKKVEPTPPEIQRYKLWLEQKYKSPYTGEVISLTKLFTEEYEIEHIIPQSRYYDDSLSNKVICESAVNKLKTNQLGLEFIQNHHGEKVRITANKEVTIFTEEQYKEFVKKHYANNSAKQQKLLLNEIPEKMVARQLNDTRYISKCISEILSKIVRSDEKDEGVNSKNIIPCTGKITTALKQDWGLNDVWNELILPRFERMNQLTQTQLFTSYNDRLQKNLPTVPIEYSQGFQKKRIDHRHHAMDALVIACATREHINYMNNQHALDKSKDKKEKQQSRIDLHPL

SEQ ID NO: 380 - protein, 303 aa, Capnocytophaga ochracea
MSFKQNLRVINKATNYYEKWEEKNGVLVKKKVKQEGTNWAIRKPLHKETVSGKIVLDRKIGKDKILTATRKAVDITFTEKIISSITDTGIQKILLNYLKYKGSPEVAFSAEGLEELNKNIAQYNDGKKHQPIYKVRIFEEGSKFPLGETGAKATKYVEAAKGTNLFFGVYQGKEKRTYATIPLNEVIERQKQGLPSVPERNEKGEPLLFSLSPNDLVYVPMEGEIAETIDFNNLSKEQKERIYKTVSFTGNQCFFVQEAVASPIVNKMEYSPLNKMERDILGIMIKEVCVKLKVDRLGNIIKA

SEQ ID NO: 381 - protein, 1471 aa, Capnocytophaga sp.
MCKYFYIKNFITFVLSKSIIPMKHILGLDLGSNSIGWAFVQQDFENKQGKIIATGSRIIPMDQGILGDFERGNTVSQTAERTTYRSTRRLRERHLLRRERLHRVLHILGFLPPHYDAQIDFTKRYGKFIDNAEPKIAYNNGNFIFMNSFNEMIEDFKKHQPQLFYKKSNGEESKIPYDWTIYYLRKKALSQKITQQELAWLILHFNQKRGYYQLRGEEETENPNKEVAFHSLKVVDVEAEAPNKKGEIWYTIRLENGWIYRRTSKIPLDDWKGKTRDFIVTTDLNDDGTIKVDKEGKEKRSFRAPDENDWNLLKKKTEHDIDFSGKTVGAYIYDHLLQNPNQKIKGKLVRTIERKYYKDELKAILAKQIALQPELFTETLLADCIRELYRKNETQQQNLLSKDFLHLFVEDIIFYQRPLRSKKSTIANCTLEKRSYIDKETNERKDAPIKVCAKSNPYYQEFRVLQWLQNLRIYEIETDREVTAEFIETPQDCEALFNFLMSQKEIDNKGLLKYFLFAKNPQIKDKAAKSELKKWLTTYRWNYVYDAADNSSKKYPMNETGYELQRYLQKVEGLPANFLTFDITYQLWHLLYSVKDKVEFEKALKKFAKKKQLDKTSFVDSFKNFKPYPNEYGSFSEKAIKKLLPLMRFGNHWDFNRIDVSTQKRIDDLINGVANEDIRTIIREKAEKYQLNSETCFQDLPLWLAQYVVYNRHAEATDIEKWTSVSDLEAYLEDFKQHSLRNPIVEQVVTETLRVVRDIWQQYGGGQANFFDEIHIELGRELKKTAEERKQLSDKNQENESTNLRIKKLLAELKEDASIQNVRPYSLVQQELLKIYEEGVFSATDEVEEDIQKIRKKAEPSKADLQRYKLWLEQKYKSPYTGEVISLTKLFTEEYEIEHIIPQSRYYDDSLSNKVICESAVNKLKTNQLGLEFIQNHHGEKVRITANKEVTIFTEEQYKEFVKKHYANNSAKQQKLLLNEIPEKMVARQLNDTRYISKYISEILSKIVRSDEKDEGVNSKNIIPCTGKITTALKQDWGLNDVWNKLILPRFERMNQLTQTQLFTSYNDRLQKNLPTVPIEYSQGFQKKRIDHRHHAMDALVIACATREHINYMNNQHALDKSKDKKEKQQSRIDLRTILCEKKNNNWQFKKPWSTFTQEAKEALEHIVVSFKQNLRVINKATNYYEKWEEKNGVLVKKKVKQEGTNWAIRKPLHKETVSGKIVLDRKIGKDKILTATRKAVDITFTEKIISSITDTGIQKILLNYLKYKGSPEVAFSTEGLEELNKNIAQYNNGKKHQPIYKVRIFEEGSKFPLGETGAKATKYVEAAKGTNLFFGVYQGKGKRTYATIPLNEVIERQKQGLPSVPERNEKGEPLLFSLSPNDLVYVPMEGEIAETIDFNNLSKEQKERIYKTVSFTGNQCFFVQEAVATPIVNKMEYSPLNKMERDILGTMIKEVCIKLKVDRLGNITKA

SEQ ID NO: 382 - protein, 1450 aa, Capnocytophaga sp.
MKHILGLDLGSNSIGWAFVQQDFENKQGKIIATGSRIIPMDQGILGDFERGNTVSQTAERTTYRNTRRLRERHLLRRERLHRVLHILGFLPPHYDSQIDFTKRYGKFIDNAEPKIAYNNGNFIFMNSFNEMIEDFKKYQPQLFYKKSNGEESKIPYDWTIYYLRKKALSQKITQQELAWLILHFNQKRGYYQLRGEEETENPNKEVAFHSLEVVDVEAEAPNKKGEIWYTIRLENGWIYRRTSKIPLDDWKGKTRDFIVTTDLNDDGTIKLDKEGKEKRSFRAPDENDWNLLKKKTEHDIDFSGKTVGAYIYDHLLQNPNQKIKGKLVRTIERKYYKDELKAILAKQIALQPELFTETLLADCIRELYRKNETQQQNLLSKDFLHLFVEDIIFYQRPLRSKKSTIANCTLEKRSYIDKETNERKDTPIKVCAKSNPYYQEFRVLQWLQNLRIYEIETDREVTAEFIETAQDNEALFNFLMSQKEIDNESLLKYFLFAKNPQIKDKVAKSELKKWLTTYRWNYVYDAADNSSKKYPMNETGYELQQYLQKVEGLPANFLTFDITYRLWHLLYSVKDKVEFEKALKKFAQEYQLDEASFVDSFKNFKPYPNEYGSFSEKAIKKLLPLMRFGNHWDFNRIDVSTQKRIDDLINGVANDEIRTIIREKAEKYQLNSETCFQGLPLWLAQYVVYNRHAEAADIEKWTSVNDLEAYLEDFKQHSLRNPIVEQVITETLRVVRDIWQRYGGGQANFFDEIHIELGRELKKTAEERKQLSNRNQENENTNLRIKKLLAELKEDASIQNVRPYSPVQQELLKIYEEGVFSATDEVEEDIQKIRKKAEPTTPEIQRYKLWLEQKYKSPYTGEVISLTKLFTEEYEIEHIIPQSRYYDDSLSNKVICESAVNKLKTNQLGLEFIQNHHGEKVRITANKEVTIFTEEQYKEFVKKHYANNSAKQQKLLLNEIPEKMVARQLNDTRYISKYISEILSKIVRSDEKDEGVNSKNIIPCTGKITTALKQDWGLNDVWNELILPRFERMNQLTQTQLFTSYNDRFQKNLPTVPIEYSQGFQKKRIDHRHHAMDALVIACATREHINYMNNQHALDKSKDKKEKQQSRIDLRTILCEKKNNNWQFKKPWSTFTQEAQEALEHIVVSFKQNLRVINKATNYYEKWEEKNGVLVKKKVKQEGTNWAIRKPLHKETVSGKIVLDRKIGKDKILTATRKSVDITFTEKIISSITDTGIQKILLNYLKYKGSPEVAFSAEGLEELNKNIAQYNDGKKHQPIYKVRIFEEGSKFPLGETGAKATKYVEAAKGTNLFFGVYQGKGKRTYATIPLNEVIERQKQGLPSVPERNEKGEPLLFSLSPNDLVYVPMEGEIAETIDFNNLSKEQKERIYKTVSFTGNQCFFVQEAVATPIVNKIEYSPLNKMERDILGTMIKEVCIKLKVDRLGNITKA

SEQ ID NO: 383 - protein, 1435 aa, Capnocytophaga sp.
MKNILGLDLGTTSIGFAHIVEDENKEKSEIKELGVRIVSLATDEQSDFEKGKSISTNANRTLKHGARLNLDRYQQRRKFLIDLLQKANLITSASILAENGKNTTHSTWQLRAKAVTERIEKEEFARVLLAINKKRGYKNSRKTKTEDEGQAIDGMAIAKCLYDENLTPGQLSLQLLQQNKKLLPDFYRSDLQKEFDLVWNLQKQFYPDILTDSFYKELQGKGKDATSKAFSKRYHFDTAENKGSKESVRLQAYQWRAEAISKQLSKEEVAYVLTEINNNLNNSSGYLGAISDRSKELYFNRQTVGQYLYAQLQENRHNSLKNKVFYRQDYLDEFERIWETQASFHKELTDELKKQIRDVVIFYQRKLKSQKGLVSFCEFESKEIEIEKDGKAITKSIGARVVPKSSPLFQEFKIWQILNNVTCKRKGIRKKKSSAKSTELDLFNEPSQSIFSLDMECKQLLFDELNLKGDLKSDKVLKLLGYSPQEWEINYNQLEGNRTQKSLYEAYLKIIEIEGYEVKDILQIKSTKDDWSLDESPLSASEIRERVKVIFQTLGICTKILYFDPLLPVKEFEQQYSYQLWHLLYSYESDDSTSGNETLYRILEKKYAFKREHATILANVALQDDYGSLSTKAIRKIYPYIKENQYSTACELAGYKHSKLSLTTEELEARELKNIIPLLKKNALRNPVVEKILNQMINVVNALIEKNSERDAEGKITKYFHFDEIRIELARELKKNAQERYEMTQNINKAKLEHQKISEKLQKQFGIKNPTKSDIIRYRLYQELEHNGYKELYTNTYIAPDVLFSKNIDIEHIVPKARVFDDSFSNKTLAFKEFNIKKGESTAFDYITSLNCEGELNQYLTRVENAYKTKSISLTKYKNLLKKASEIGDGFINRDLRDTQYIAKKAKEILFQVTKNVLSTSGSITDRLREDWGLVDVMKELNMPKYQSLGLTEVEERKDGNKVTVIKDWTKRNDHRHHAMDALTVAFTKPSYIQYLNHLNARKDENNKNYSVILAIEKKETIKVPINNGKNKRVFIEPILNFRQVAKKHLEEIFISHKAKNKVVTKNINKPAGTDKQQITLTPRGQLHKETIYGKYQYYVNKEEKVGVKFDERTITKVSNPLYREALLKRLQANDNDPKKAFAGKNALSKNPIYLDEAKTKTLPEKVNLTYLEEDFSIRKDISPDNFKDLKSIEKVIDQGVKRILIKRLQAYDNDPKKAFVDLEKNPIWLNKEKGIAIKRVTISGVSNAQPLHIGKDHLGKTTLNKEGKEVPVDYVSTGNNHHVAIYRDKEGNLQEQIVSFFEAVVRAQQGLPIIDKNYKQAEGWQFMFTMKQNEMFVFPNEATGFNPAEIDLLDPKNKKLISPNLFRVQTISIVKYGNSVVRDFKFRHHLETTLQDDKILQGITFQQIKSLEPLRNIVKVRINHLGDIVNIGEY

SEQ ID NO: 384 - protein, 1432 aa, Capnocytophaga sp.
MKNILGLDLGTTSIGFAHIVEDENKEKSEIKELGVRIVSLTTDEQSDFEKGKSITTNANRTLKHGARLNLDRYQQRRKYLIDLLHKANLITPSSILAENGKNTTHSTWQLRAKAVTERIEKEEFARILLAINKKRGYKSSRKAKTEDEGQAIDGMAIAKRLYDENLTPGQLSLQLLQQNKKLLPDFYRSDLQKEFDLVWNFQKQFYPDILTDIFYKELQGKGKDATSKAFSKRYHFDTAENKGSKESVRLQAYQWRAEAVSKQLSKEEVAYVLTEINNNLNNASGYLGAISDRSKELYFNRQTVGQYLYAQLQENRHNSLKNKVFYRQDYLDEFERIWETQALFHKELTDELKKQIRDVVIFYQRKPKSQKGLISFCEFESKEIEIEKDGKTITKNIGARVVPKSSPLFQEFKIWQILNNVICKRKGIRKKKISAKTTQLDLLNESSQTIFSLDMECKQLLFDELNLKGDLKSDKVLKLLGYSPQEWEINYNQLEGNRTQKALYEAYLKIVEMEAHDVKDILQIKSTKDDWSLDESPLSASEIRESVKAIFQALGICTKILYFDPLLPVKDFEEQDSYQLWHLLYSYESDDSTSGNETLYRILEKKYAFKREHARILANVALQDDYGSLSTKAIRKIYPNIKENQYSTACEMAGYKHSKLSLTTEELEARELKNIIPLLKKNALRNPVVEKILNQMINVVNALIEKNSERDAEGKITKYFHFDEIRIELARELKKNAQKRYEMTQNINKAKSEHQKISEILQKEFGIKNPTKSDIIRYRLYKELEHNGYKELYTNTYIAPDVLFSKNIDIEHIVPKARVFDDSFSNKTLAFKDFNIKKGESTAFDYITSLKNEEKLNQYLARVENAYKTKNISPAKYKNLLKKASEIGDGFINRDLRDTQYIAKKAKEILFQVTKNVLSTSGSITDRLREDWSLVDVMKELNMPKYQSLGLTEVEERKDGNKVTVIKDWTKRNDHRHHAMDALTVAFTKPSYIQYLNHLNARKDENNKNYSVILAIEKKETIKVPTNNGKNKRVFIEPIPNFRQVAKKHLEEIFISHKAKNKVVTKNTNKPAGTNKQQITLTPRGQLHKETIYGKYQYYVNKEEKVGVKFDKETIAKVSNPLYREALLKRLQANDNDPKKAFTGKNALSKNPIYLDEAKTKTLPEKVNLTYLEEDFSVRKKIVPKNPTSKEFVPNLKSIEKVVDEGVRNILIERLRVYNNDPEKAFVDLEKNPIWLNKEKGIAIKRVTISGVNNAQPLHIGKDHLGKTTLNKEGKEIPVDYVSTGNNHHVAIYRDKEGNLQEQIVSFFEAVVRTQQGLPIIDKTYKQEEGWQFLFTMKQNEMFVFPNEATGFNPAEIDLLDPKNKKQISPNLFRVQKIATKDYFFRHHLETNVETDNVLKNTTWKREGLSGLKDIVKVRINHLGDIVSIGEY

SEQ ID NO: 385 - protein, 1426 aa, Capnocytophaga sp.
MKNILGLDLGTTSIGFTHIVEDENKEKSEIKELGVRIVSLTTDEQSDFEKGKSISTNANRTLKHGARLNLDRYQQRRKFLIDLLQKANLITSSSILAENGKNTTHSTWQLRAKAVTERIEKEEFARVLLAINKKRGYKSSRKAKTEDEGQAIDGMAIAKRLYDENLTPGQLSLQLLQQNKKLLPDFYRSDLQKEFDLVWNFQKQFYPDILTDSFYKELQGKGKDATSKAFSKRYHFDTAENKGSRESVRLQAYQWRAEAISKQLSKEEVAYVLTEINNNLNNASGYLGAISDRSKELYFNRQTVGQYLYAQLQENKHNSLKNKVFYRQDYLDEFERIWETQASFHKELTEELKKQIRDVVIFYQRKLKSQKGLISFCEFESKEIEIEKDGKTITKSIGARVVPKSSPLFQEFKIWQILNNVTCKRKGIRKKKSSAKSTELDLFNEPSQTIFSLDMECKQLLFEELNLKGDLKSDKVLKLLGYSPQEWEINYNQLEGNRTQKALYEAYLKIVEMEAHDVKDILQIKSTKDDWALEESPLSASEIRERVKAIFQTLGICTKILYFDPLLPVKEFEEQDSYQLWHLLYSYESDDSTSGNETLYRILEKKYAFKREHATILANVTLQDDYGSLSTKAIRKIYPYIKENQYSTACEKAGYKHSKLSLTTEELEARELKNIIPLLKKNALRNPVVEKILNQMINVVNALIEKNSERDAEGKITKYFHFDEIRIELARELKKNAQERYEMTQNINKAKLEHQKISGILQKEFGIKNPTKSDITRYRLYQELAHNGYNDLYTNTYIPKELLFSKNIDIEHIVSKARVFDDSFSNKTLAFREFNIKKGESTAFDYITSLNNEEELNQYLNRVENAYKTKNISPAKYKNLLKKASEIGDGFINRDLRDTQYIAKKAKEILFQVTKNVLSTSGSITDRLREDWGLVDVMKELNMPKYQSLGLTEVEERKEGNKVTVIKNWTKRNDHRHHAMDALTVAFTKPSYIQYLNHLNARKDKNNKNYSVILAIEEKETIKVPTNNGKNKRVFIEPIPNFRQVAKKHLEEIFISHKAKNKVVTKNTNKPAGTDKQQITLTPRGQLHKETVYGKYQYYVNKEEKIGVKFDKETIAKVSNPVYREALLKRLQANDNDPKKAFAGKNALSKNPIYLDEAKTKTLTEKVNLTYLEEDFSIRKDISPDNFKDLKSIEKVIDQGVKRILIKRLQDYDNDPKKAFVDLEKNPIWLNKEKGIAIKRVTISGVNNAQPLHIGKDHLGKTTLNKEGKEIPVDYVSTGNNHHVAIYRDKEGNLQEQIVSFFEAVVGAQQGLPIVDKTYKQAEGWQFLFTMKQNEMFVFPNEATGFNPAEIDLLDPKNKKQISPNLFRVQKIATKDYFFRHHLETNVDTDNVLKNTTWKREGLSGLKDIVKVRINHLGDIVSIGEY

SEQ ID NO: 386 - protein, 1450 aa, Capnocytophaga sp.
MKRILGLDLGSNSIGWAFVEQDFENKQGKIIATGSRIIPMDQGILGDFEKGNTVSQTAERTTYRSMRRLRERHLLRRERLHRVLHILGFLPPHYDAQIDFTKRYGKFIDNAEPKIAYNNGNFIFMNSFNEMIEDFKKYQPQLFYKKSNGEESKIPYDWTIYYLRKKVLSQKITQQELAWLILHFNQKRGYYQLRGEEETENPNKEVAFHSLKVVDVEAEAPNKKGEIWYTIRLENGWIYRRTSKIPLDDWKGKTRDFIVTTDLNDDGTIKVDKEGKEKRSFRAPDENDWNLLKKKTEHDIDFSGKTVGAYIYDHLLQNPNQKIKGKLVRTIERKYYKDELKAILAKQIALQPELFTETLLADCIRELYRKNETQQQNLLSKDFLHLFVEDIIFYQRPLRSKKSTIANCTLEKRSYIDKETNERKDTFIKVCAKSNPYYQEFRVLQWLQNLRIYEIETDREVTAEFIETAEDYEALFNFLMSQKEIDNEGLLKYFLFAKNPQIKDKVAKSELKKWLTTYRWNYVYDAADNSSKKYPMNETGYDLQRYLQKVEGLPANFLTFDITYRLWHLLYSVKDKVEFEKALKKFAQEYQLDEASFVDSFKNFKPYPNEYGSFSEKAIKKLLPLMRFGNHWDFNRIDVSTQKRIDDLINGVANDEIRTIIREKAEKYQLNSESCFQGLPLWLAQYVVYNRHAEATDIEKWTSVSDLETYLEDFKQHSLRNPIVEQVVTETLRVVRDIWQQYGGGQANFFDEIHIELGRELKKTAEERKQLSNRNQENENTNLRIKKLLAELKEDASIQNVRPYSPVQQELLKIYEEGVFSSTDQVEEDIQKIRKKAEPTTPEIQRYKLWLEQKYKSPYTGEVISLTKLFTEEYEIEHIIPQSRYYDDSLSNKVICESAVNKLKTNQLGLEFIQNHHGEKVRITGNKEVTIFTEEQYKEFVKKHYANNSAKQQKLLLNEIPEKMVARQLNDTRYISKYISEILSKIVRSDEKDEGVNSKNVIPCTGKITTALKQDWGLNDVWNELILPRFERMNQLTQTQLFTSYNDRFQKNLPTVPIEYSQGFQKKRIDHRHHAMDALVIACATREHINYMNNQHALDKNKDKKEKQQSRIDLRTILCEKKNNNWQFKKPWSTFTQETKEALEHIVVSFKQNLRVINKATNYYEKWEEKNGVLVKKKVKQEGTNWAIRKPLHKETVSGKIVLDRKIGKDKILTATRKEVDITFTEKIISSITDTGIQKILLNYLNYKGSPEVAFSAEGLEELNKNIAQYNDGKKHQPIYKVRIFEEGSKFPLGETGAKATKFVEAAKGTNLFFGVYQGKEKRSYATIPLNEVIERQKQGLPSVPERNEKGEPLLFSLSPNDLVYVPMEGEIAETIDFNNLSKEQKERIYKTVSFTGNQCFFVQEAVATPIVNKMEYSPLNKMERDILGTMIKEVCIKLKVDRLGNITKA

SEQ ID NO: 387 - protein, 1437 aa, Capnocytophaga sp.
MKYIKYILGLDIGSNSIGWALIQLDLLQKTKRIIATGSRIIPMDQKVLSDFGKGITISPTAQRTSYRNARHCRERHLLRRERLHRVLHILGFLPTHYDKQIDFSKRYGKFVDNTEPKIAYNERKFLFMDSFQEMLADFKIHQPDLFYTKKNGEESKIPYDWTIYYLRKKALSRKISKEELAWIILNFNQKRGYYQLREEEEENKENDFEIISSKIISVIKKDKDKKYNKYWYDIILENGLVYQAAFYNDFVYNWINQDREFIIERISLKNGTEKVKLSYLPTFDEIDKMDKKEQDKYYKKIKIKTENSIGNKTVGCYIYDHILQNPNEKIKGKLVRTIERKYYKEELKAILEKQVALQPELFTDQLFADCIRELYSKNEAQQRNLAARDFVHLFVEDIIFYQRSLRRQKSTLANCSLESRSYIDKDSHTRKEAPLKVCPKSNPYYQEFRVLQWLQNLKIYEIDTDQEVTHEFIKTLEDKQQFFDFLMNQKEIDCEELLKYFLNQTYPNAREKALKSELKKWKDTYRWNYVYDIGEKSSKKYPMNETRYELKRHLEKVANLPDDFLSSEVEYLLWHLIYSVKDKVAYEKGLKTFAQKHHLDKDSFVESFKKFKPYPSEYGSFSEKAIRKLLPLMRFGSYWDFNHIDKNTQKRIEDLITGVENEEIRTILREKAEKYQLEKETDFQDLPLWLAQYIVYNRHAEASSLEKWTSVNDLETYLNEFKQYSLRNPIVEQVVMETLRVVRDIWQQYGQGQASFFDEIHIELGRELKKTAKEREKLSKQNQKNEDINLSIKEKLKELEKYNTRAYSITHQEKYKLWLEQKHISPYTGQIISPENLFTDNYEIEHIIPQSRFFDDSLSNKVVCESIVNKAPYKDRQLGLEFIKNQGGRIVKELSTENKTIKIFTEEQYRTFIKEHYSNNPEKTKKLLLEEIPEKMVARQMNDTCYISKFISEILSKIVRSDEQDEGVHSKNVILCTGKITSALKQDWGVNDVWNDLILPRFERMNDLTQSTLFTTYNEKYQKYLPTVPMEYSNGFQKKRIDHRHHAMDAIIIACATREHINYINNQHALEKGKDKKEKQKEHDKLREKLCIKKDNKGSEENYSWIFKKPWDTFTQEVQAALEGIVVSFKQNLRVINKATNYYERWVEENGKYIKKMVKQEGTNWAIRKPLHEETISGKIYLDREEITKNDILTATRKTVDSSFDEKRIKKITDTGIQKILLNYLKYKGSPEIAFSPEGLEELNKNLSIYNDGKPHKPIYKVRIYEKGSGRFALGEKGRKYKKYVQGAPNLYFGIYQGANKRSFATIPLNEVIERQKQGRPSIPEYNEKGDPLLFSLSPNDLVYVPVEGEIIEDIDFQNLSKEQKERIYNVNDFSSTCYFTPNRIAKAIFPKEVDLQRKGDKLPGSYDTKTASLEGIQIKEVCIKLKIDRLGNISKA

SEQ ID NO: 388 - protein, 1140 aa, Catellicoccus marimammalium
MKNMTKVNVGLDVGISSAGWSVINAETNQILESGVRLFSGSDADENVNRRNQRQGRRLFRRRKLRIQEAKKYLENVFQLKDIEPKDEWNPYEIRVRALNEKVSKEELSIALLNIVKHRGISYELEDVTDEEGTNTQSFQSGLDYNRRLLKTKTVGEIQYDRLQKYGQVRGQIQTEDGLLINIFPTKNYVEEVERILETQKKYHPEIDDVFIEKIISFVTRKREYFVGPGNEKSRTDYGIYRENGETLDNLFEILIGKDKFYPEEYRAAGSSYTAQIFNLLNDLNNLRIPTTEDHHLTKAQKEEIITELKNTSRLSGGMLKLISKVTKAPKEEISGYRKDEKDKPDLHSLAYYRKQKNMLEKEGIQIADFSEELLDELATMMTLNTEPGEIRKQLNKITNQYDILTPEVIEVLVKNHTAFVATSNHKWHRFSLKLMKEFIPELLETSKEQSTILCERGFIQNRASYLDENHHFNYAELRENLYNPVVRKSTCEMLKVFTAIQEKYPNIQNVIVELPRETNEDEQKRKIKKINDNNAKRKKEILKEAQAQSGLSEEALEEKLLKTKGLYLKLMLWYEQEGKCVYSGQEIPLSDLLQNKGGYEVDHIIPISISFDDRLCNKVLVRQQLNSQKSNQTPFEYMTTHTDGHLSFHELKELVGKNKRFSKEKRELLLAEIYSNDIETRKRFINRNLVDTSYTARIVLNALQQYKKENQLSMNVSVVRGAMTNILRKKVKLDKTRETFHHHAIDASLMAVIPNIEFFKERKEWLPKSANEEVVEVEVSEEETMPEKEFKVKMRLPESFIQDVQILQRNSFAKEEVSGPQTRERNLKIKFSHQVDQKMNRKVADDTIYGTRQAQLGKDKKEETYVIGKIKDIYNYDEYVRFKKRYDKNKESFLMYHHDPQTFEKLEEILAQYPEYIEDEKGKKKKVSPFALYREENGPVTKYAKKNNGPVIKQLKYYDSKLNRKIDISHKYSTKNRQVVLQSLKPYRTDVYRNQDTGEYTLVGIDQNDGKFVNGHYGIPKSRYEEIKANNKLSEHDEFVFSLYKNSMVKVIDENGESIVVRYLSRSMPNRKNNAEIKPVEKYQFEDGEVVPVYGKCRKQMQTVFVKKGWTLLKGNTDILGNTYFVEKESENPKKMIDDK

SEQ ID NO: 389 - protein, 1419 aa, Chryseobacterium sp.
MMIKNILGLDLGTNSIGWALIKQNFENKYGEILGMGSRIIPMSQDVLGEFGKGNSVSQTAARTGYRGVRRLRERFLLRRERLHRVLNVLNFLPEHYASQIDFEKRFGKFKYETEPKLAYNNDGFFFKNSFDEMLGDFKDHQFHLLENGRKVPYDWTIYYLRKKALSQKIEKEELAWILLNFNQKRGYYQLRGEDFEEEKDRVFVRLKVDRVVDSGENIKGKILYDVYFENGWKYEKQIVKTEDWIGRTKEFIVTESILKNGDTKRTFKAVDSEKDWIAIKTKTEQEIDKSHKTVGAYIYEALLQNPKQKIKGKLVRTIERKFYREELKKILERQKEFHPELQSDDLYNDCIRELYRNNEAHQITLSKKDFVHLLLNDLIFYQRPLRSQKSSVSNCTLEFRKYKDENGVEHAQYLKTIPKSNPYYQEFRVWQWMFNLNIYRKDDDTNVTKEFLSSTEDYETLFEFLNNRKEVDQKALLRHFKLNEKTHRWNYVEDKKYPCNETKTMISTRLEKVENYPSDFLTREMEQNIWHIIYSVNDKIEYEKALKSFAHKNNLDENSFFEAFKKFPPFKSEYGSFSEKAIKKLLPLLRLGKYWNWESIDRKSQGRIEKIITGEFDGNIKDKVREKAIHLTAENDFQGLQLWLAQYIVYGRHSEASMIGKWNSADDLEEFLKGFKQHSLRNPIVEQVITETLRVVKDIWLKYGNGAKDFFSEIHIELGREMKQTKDERVDATKRITENENTNLRIKALLAEMMNDNSVENIRPYSPMQQEILKIYEDGILKSDIEIDDDILKISKTAQPSSSDLKRYKLWLEQRYKSPYTGQIIPLNKLFTSEYEIEHIIPQSRYFDDSFSNKIICESAVNKLKDNYIGLGFIKQFGGMIVECGFGKSVEIFKAEEYEDFVKKHYANNRSKRNKLLLEEIPEKMIDRQLNDTRHISKYISGVLSNIVRQEDGTDEGVNSKNIVPGNGKITTQLKQDWGLNDVWNELILPRFERMNQLTNSTDFTSWNKNHQKFLPTVPIEFSKGFSKKRIDHRHHAMDALVIACATKDHINLLNNQSAKSDTKRYDLKRKLMKFERVVYSHSKTGEKIEKEVPKQFLKPWDNFTVDAKNKMETIIVSFKQNLRVINKATNHYEKWIEKDGIKRKELIKQEGTNWAIRKPMHKETVSGKVDLPGIKIPKGKILTATRKSLDTSFDLKTINSITDTGIQKILKNYLEFKGSSELAFSPEGIEDMNKNIEKFNDGKPHQSINKVRIFELGSKFSVGQTGNKKDKYVEAAKGTNLFFAVYEDKNGKRSYETIPLNEVIERQKQGLDSVSFKNKEDFLLCPNDLVYVPSEDELENIYNIDFKNLTTEKTGNIYKVVSFSGNQIFFIRQDIAISIVNKAEFSTLNKMERAIDGSMIKENCIKLKIDRLGNIAKI

SEQ ID NO: 390 - protein, 1065 aa, Clostridium perfringens
MNKDINYALGLDIGITSVGWAVINLDLNRIEDLGVRIFNAAENPKDGSSLALPRRLARGRRRLLRRKAYRVERVRKLIVKNNILTKEELEGLFKNKEVIDVWEARVKGLDYKLSREEWAKILINFCKRRGFKSNRKNETKDKEAGQILSSISYNIEKMKETNSRTIGEYIYNEVKNSDDSYAPLRNKFGEYKMCVSRDVLREEIHTLFEKQRELGNNFASDEIEDKYFEIFNSQRPFSNFEDLEKLVGFCTFERKKHKRAPKHCISSEEFTLYEGINKLSIIKDGEKRKLSEEERTLVVNEAFNKKEIKYTTLRKLLGLSEDELFSTLTYSIDKDISKTENTKFVSLKGYHEIKRAIEKGVSKKAWQDIENNRNLLNDIAYVLTLGKTDDEIEKQLRLRNVPEELFESLLDMSFSKFNNLSIYALEKILPFMKEGYQYNEACEKAGYNFKAIYEGVRTKKLPVIEIDEIVNPVVNRALAQTRKVINSVIDKYGSPVRINIELARDLAKNFKDRKLIEKEQKENRANLDKIRENLRELMDKEPTAVEVLKYRLWEQQRGECAYTQSQIALERLFSPGYCEIDHIIPFSRSFDDSLSNKILVLGSENQRKGNKIPYEYFGEDSERWNSFEIWVKGSYLNYKKKANLLKKKFTEEEQRDWKARNLQDTKYICRYISNFVNNRLEFKESENKQKVITVNGRATAYLRSRWGLNKVREDGDKHHALDAAVVGVTTQGMVQKISKYSKAHELYTVRKNDEFVDVETGECVDVDEYKEIRKDILPRPWRGFSEELKLRLSDNPLEELKKLPIETYNEEFIKENVKPIFVSRVPFRKISGKLFKETIYSERAFKDGYFVSKKSLVDLKRGDLDNFYNYECDKKLYDAISERMKEFNYNGKKAFESPFRKPTKSGKEGPVVRSVKIKSAAPFKDGIPMNEGLVAKEGMVRIDIYEKEGKYFVVPVYRYQLAKGIVPKRAAIAGKSELKWPIMDQTYNFKFSIFKNDLIEIKYAKKDGYFGYYDGFDRHTASLVIENHDNSDRYRGIGVKTGVVEFNKYEVDVLGNYHKVNLGGN

SEQ ID NO: 391 - protein, 1099 aa, Corynebacterium accolens
MSLSYRVGIDVGTYSLGCTAIEVDDNDQPVNILSSVSLIHDSGLDPDQQKRAVTRLASSGVARRTRRLYRRRRRRMINLEKFLTSQGWETRPFEHYSDPYLPWNARVALVNGYISDDAQRGMYLSIAFRHIANHRGWRNPYWKVSSLYSPDKPSDAFEQIRKELEESTGHKIPETVTVGQLISFAQFGKDRLRGGGKKKDEKKPQEQVNQAVISARLHQIDHAREINEICRVQKIDDALRKQILDLVFAAESPKGAQIGRVGKDPLQPKLPRALKASDAFQQYRIVALAGNLRIYRDGVSTPLDRDEKLIVFNYLINLSHKEEPSWLKVAEVLNIDRGQLHGTATMTDDGERAGAAPPVHDTNRTILGCKIKPLVHWWEGANDDERAAMLKALSNSEVEDFDSPAGAQTQAFFANLDESEQEKLDSLHLPIGRAAYSEDTLMRLTSRMLDENLDLYEARLAEFDIPKDWAPPAPRIGEPVGNPAVDRVLKGVARWLEAAADEWGAPKSVVIEHVRDGFISKSKANEIDRANNARHKRNRELFKQMQENLGIDGKLRSSDLWRYQSVQRQNCQCAYCGSPITYTTCEMDHIVPRAGEGSTNTRDNLVATCHRCNLAKKNIPFAVWAAQTNIPGVSVKEALDRTRHWSEDSGMTSKDFKKFRKNVCDRLKRTVVDEPLDARSMESVAWMANELRGRVAQRFQEENTVVNVYRGELTAEARRAAGISDKLRFIDGTGKSRLDRRHHAVDAAVVAFTQNYVAETLAIRSNKKREAQLLQAAEQWKEFTGSDAEHRAAWNAWLPKMQKLAVLLQKALDEDRIAVTSNLRLRLGNGRAHEDSIGELKTIRVGDAISVTDIDRASSEALWCALTREPDFDENNGLPENPDRRIRIHGTWYDAEDDIEVFPVGAGAIKVRGGYAELSRFHHARIYKIPGKKAPVYCMLRVYNADLIRHRHEDLFSVEIKPQTMSVRQAEPKLRKALAENTAEYLGWLVTDDELVIDTSNFNTGQIAEMQSELGQVRRWRLDGFYSPSTLRLRPLQMSAEGLREDTSIGAKKIIDRPGWLPAINKLFGEGHVTVVRRDALGRARLTSNAHLPISWKAE

SEQ ID NO: 392 - protein, 1084 aa, Corynebacterium diphtheriae
MKYHVGIDVGTFSVGLAAIEVDDAGMPIKTLSLVSHIHDSGLDPDEIKSAVTRLASSGIARRTRRLYRRKRRRLQQLDKFIQRQGWPVIELEDYSDPLYPWKVRAELAASYIADEKERGEKLSVALRHIARHRGWRNPYAKVSSLYLPDGPSDAFKAIREEIKRASGQPVPETATVGQMVTLCELGTLKLRGEGGVLSARLQQSDHAREIQEICRMQEIGQELYRKIIDVVFAAESPKGSASSRVGKDPLQPGKNRALKASDAFQRYRIAALIGNLRVWVDGEKRILSVEEKNLVFDHLVNLTPKKEPEWVTIAEILGIDRGQLIGTATMTDDGERAGARPPTHDTNRSIVNSRIAPLVDWWKTASALEQHAMVKALSNAEVDDFDSPERAKVQAFFADLDDDVHAKLDSLHLPVGRAAYSEDTLVRLTRRMLSDGVDLYTARLQEFGIEPSWTPPTPRIGEPVGNPAVDRVLKTVSRWLESATKTWGAPERVIIEHVREGFVTEKRAREMDGDMRRRAARNAKLFQEMQEKLNVQGKPSRADLWRYQSVQRQNCQCAYCGSPITFSNSEMDHIVPRAGQGSTNTRENLVAVCHRCNQSKGNTPFAIWAKNTSIEGVSVKEAVERTRHWVTDTGMRSTDFKKFTKAVVERFQRATMDEEIDARSMESVAWMANELRSRVAQHFASHGTTVRVYRGSLTAEARRASGISGKLEFLDGVGKSRLDRRHHAIDAAVIAFTSDYVAETLAVRSNLKQSQAHRQEAPQWREFTGKDAEHRATWRVWCQKMEKLSALLTEDLRDDRVVVMSNVRLRLGNGSAHEETIGKLSKVKLGSQLSVSDIDKASSEALWCALTREPDFDPKDGLPANPERHIRVNGTHVYAGDNIGLFPVSAGSIALRGGYAELGSSFHHARVYKITSGKKPAFAMLRVYTIDLLPYRNQDLFSVELKPQTMSMRQAEKKLRDALATGNAEYLGWLVVDDELVVDTSKIATDQVKAVEAELGTIRRWRVDGFFGDTRLRLRPLQMSKEGIKKESAPELSKIIDRPGWLPAVNKLFSEGNVTVVRRDSLGRVRLESTAHLPVTWKVQ

SEQ ID NO: 393 - protein, 1084 aa, Corynebacterium diphtheriae
MKYHVGIDVGTFSVGLAAIEVDDAGMPIKTLSLVSHIHDSGLDPDEIKSAVTRLASSGIARRTRRLYRRKRRRLQQLDKFIQRQGWPVIELEDYSDPLYPWKVRAELAASYIADEKERGEKLSVALRHIARHRGWRNPYAKVSSLYLPDGPSDAFKAIREEIKRASGQPVPETATVGQMVTLCELGTLKLRGEGGVLSARLQQSDHAREIQEICRMQEIGQELYRKIIDVVFAAESPKGSASSRVGKDPLQPGKNRALKASDAFQRYRIAALIGNLRVRVDGEKRILSVEEKNLVFDHLVNLAPKKEPEWVTIAEILGIDRGQLIGTATMTDDGERAGARPPTHDTNRSIVNSRIAPLVDWWKTASALEQHAMVKALSNAEVDDFDSPEGAKVQAFFADLDDDVHAKLDSLHLPVGRAAYSEDTLVRLTRRMLADGVDLYTARLQEFGIEPSWTPPAPRIGEPVGNPAVDRVLKTVSRWLESATKTWGAPERVIIEHVREGFVTEKRAREMDGDMQRRAARNAKLFQEMQEKLNVQGKPSRADLWRYQSVQRQNCQCAYCGSPITFSNSEMDHIVPRAGQGSTNTRENLVAVCHRCNQSKGNTPFAIWAKNTSIEGVSVKEAVERTRHWVTDTGMRSPDFKKFTKAVVERFQRATMDEEIDARSMESVAWMANELRSRVAQHFASHGTTVRVYRGSLTAEARRASGISGKLKFFDGVGKSRLDRRHHAIDAAVIAFTSDYVAETLAVRSNLKQSQAHRQEAPQWREFTGKDAEHRAAWRVWCQKMEKLSALLTEDLRDDRVVVMSNVRLRLGNGSAHKETIGKLSKVKLGSQLSVSDIDKASSEALWCALTREPDFDPKEGLPANPERHIRVNGTHVYAGDNIGLFPVSAGSIALRGGYAELGSSFHHARVYKITSGKKPAFAMLRVYTIDLLPYRNQDLFSVELKPQTMSMRQAEKKLRDALATGNAEYLGWLVVDDELVVDTSKIATDQVKAVEAELGTIRRWRVDGFFSPSKLRLRPLQMSKEGIKKESAPELSKIIDRPGWLPAVNKLFSDGNVTVVRRDSLGRVRLESTAHLPVTWKVQ

SEQ ID NO: 394 - protein, 1084 aa, Corynebacterium diphtheriae
MKYHVGIDVGTFSVGLAAIEVDDAGMPIKTLSLVSHIHDSGLDPDKIKSAVTRLASSGIARRTRRLYRRKRRRLQQLDKFIQRQGWPVIELEDYSDPLYPWKVRAELAASYIADEKERGEKLSVALRHIARHRGWRNPYAKVSSLYLPDEPSDAFKAIREEIKRASGQPVPETATVGQMVTLCELGTLKLRGEGGVLSARLQQSDHAREIQEICRMQEIGQELYRKIIDVVFAAESPKGSASSRVGKDPLQPGKNRALKASDAFQRYRIAALIGNLRVRVDGEKRILSVEEKNLVFDHLVNLAPKKEPEWVTIAEILGIDRGQLIGTATMTDDGERAGARPPTHDTNRSIVNSRIAPLVDWWKTASALEQHAMVKALSNAEVDDFDSPEGAKVQAFFADLDDDVHAKLDSLHLPVGRAAYSEDTLVRLTRRMLADGVDLYTARLQEFGIEPSWTPPAPRIGEPVGNPAVDRVLKTVSRWLKSATKTWGAPERVIIEHVREGFVTEKRAREMDGDMRRRAARNAKLFQEMQEKLNVQGKPSRADLWRYQSVQRQNCQCAYCGSPITFSNSEMDHIVPRAGQGSTNTRENLVAVCHRCNQSKGNTPFAIWAKNTSIEGVSVKEAVERTRHWVTDTGMRSTDFKKFTKAVVERFQRATMDEEIDARSMESVAWMANELRSRVAQHFASHGTTVRVYRGSLTAEARRASGISGKLEFLDGVGKSRLDRRHHAIDAAVIAFTSDYVAETLAVRSNLKQSQAHRQEAPQWREFTGKDAEHRAAWRVWCQKMEKLSALLTEDLRDDRVVVMSNVRLRLGNGSAHEETIGKLSKVKLGSQLSVSDIDKASSEALWCALTREPDFDPKDGLPANPERHIRVNGTHVYAGDNIGLFPVSAGSIALRGGYAELGSSFHHARVYKITSGKKPAFAMLRVYTIDLLPYRNQDLFSVELKPQTMSMRQAEKKLRDALATGNAEYLGWLVVDDELVVDTSKIATDQVKAVEAELGTIRRWRVDGFFGDTRLRLRPLQMSKEGIKKESAPELSKIIDRPGWLPAVNKLFSEGNVTVVRRDSLGRVRLESTAHLPVTWKVQ

SEQ ID NO: 395 - protein, 1084 aa, Corynebacterium diphtheriae
MKYHVGIDVGTFSVGLAAIEVDDAGMPIKTLSLVSHIHDSGLDPDKIKSAVTRLASSGIARRTRRLYRRKRRRLQQLDKFIQRQGWPVIELEDYSDPLYPWKVRAELAASYIADEKERGEKLSVALRHIARHRGWRNPYAKVSSLYLPDEPSDAFKAIREEIKRASGQPVPETATVGQMVTLCELGTLKLRGEGGVLSARLQQSDHAREIQEICRMQEIGQELYRKIIDVVFAAESPKGSASSRVGKDPLQPGKNRALKASDAFQRYRIAALIGNLRVRVDGEKRILSVEEKNLVFDHLVNLAPKKEPEWVTIAEILGIDRGQLIGTATMTDDGERAGARPPTHDTNRSIVNSRIAPLVDWWKTASALEQHAMVKALSNAEVDDFDSPEGAKVQAFFADLDDDVHAKLDSLHLPVGRAAYSEDTLVRLTRRMLADGVDLYTARLQEFGIEPSWTPPAPRIGEPVGNPAVDRVLKTVSRWLESATKTWGAPERVIIEHVREGFVTEKRAREMDGDMRRRAARNAKLFQEMQEKLNVQGKPSRADLWRYQSVQRQNCQCAYCGSPITFSNSEMDHIVPRAGQGSTNTRENLVAVCHRCNQSKGNTPFAIWAKNTSIEGVSVKEAVERTRHWVTDTGMRSTDFKKFTKAVVERFQRATMDEEIDARSMESVAWMANELRSRVAQHFASHGTTVRVYRGSLTAEARRASGISGKLEFLDGVGKSRLDRRHHAIDAAVIAFTSDYVAETLAVRSNLKQSQAHRQEAPQWREFTGKDAEHRAAWRVWCQKMEKLSALLTEDLRDDRVVVMSNVRLRLGNGSAHEETIGKLSKVKLGSQLSVSDIDKASSEALWCALTREPDFDPKDGLPANPERHIRVNGTHVYAGDNIGLFPVSAGSIALRGGYAELGSSFHHARVYKITSGKKPAFAMLRVYTIDLLPYRNQDLFSVELKPQTMSMRQAEKKLRDALATGNAEYLGWLVVDDELVVDTSKIATDQVKAVEAELGTIRRWRVDGFFGDTRLRLRPLQMSKEGIKKESAPELSKIIDRPGWLPAVNKLFSEGNVTVVRRDSLGRVRLESTAHLPVTWKVQ

SEQ ID NO: 396 - protein, 1084 aa, Corynebacterium diphtheriae
MKYHVGIDVGTFSVGLAAIEVDDAGMPIKTLSLVSHIHDSGLDPDKMKSAVTRLASSGIARRTRRLYRRKRRRLQQLDKFIQRQGWPVIELEDYSDPLYPWKVRAELAASYIADEKERGEKLSVALRHIARHRGWRNPYAKVSSLYLPDEPSDAFKSIREEIKRASGQPVPETATVGQMVTLCELGTLKLRGEGGVLSARLQQSDHAREIQEICRMQEIGQELYRKIIDVVFAAESPKGSASSRVGKDPLQPGKNRALKASDSFQRYRIAALISNLRVRVDGEKRILSVEEKNLVFDHLVNLAPKKEPEWVTIAEILGIDRGQLIGTATMTDDGERAGARPPTHDTNRSIVNSRIAPLVDWWKTASALEQHAMVKALSNAEVDDFDSPEGAKVQAFFADLDDDVHAKLDSLHLPVGRAAYSEDTLVRLTRRMLADGVDLYTARLQEFGIEPSWTPPAPRIGEPVGNPAVDRVLKTVSRWLESATKTWGAPERVIIEHVRDGFVTEKRAREMDGDMRRRAARNAKLFQEMQEKLNVQGKPSRADLWRYQSVQRQNCQCAYCGSPITFSNSEMDHIVPRAGQGSTNTRENLVAVCHRCNQSKGNTPFAIWAKNTSIEGVSVKEAVERTRHWVTDTGMRSTDFKKFTKAVVERFQRATMDEEIDARSMESVAWMANELRSRVAQHFASHGTTVRVYRGSLTAEARRASGISGKLEFLDGVGKSRLDRRHHAIDAAVIAFTSDYVAETLAVRSNLKQSQAHRQEAPQWREFTGKDAEHRAAWRVWCQKMEKLSALLTEDLRDDRVVVMSNVRLRLGNGSAHEETIGKLSKVKLGSQLSVSDIDKASSEALWCALTREPDFDPKDGLPANPERHIRVNGTHVYAGDNIGLFPVSAGSIALRGGYAELGSSFHHARVYKITSGKKPAFAMLRVYTIDLLPYRNQDLFSVELKPQTMSMRQAEKKLRDALATGNAEYLGWLVVDDELVVDTSKIATDQVKAVEAELGTIRRWRVDGFFGDTRLRLRPLQMSKEGIKKELAPELSKIIDRPGWLPAVNKLFSEGNVTVVRRDSLGRVRLESTAHLPVTWKVQ

SEQ ID NO: 397 - protein, 1084 aa, Corynebacterium diphtheriae
MKYHVGIDVGTFSVGLAAIEVDDAGMPIKTLSLVSHIHDSGLDPDKMKSAVTRLASSGIARRTRRLYRRKRRRLQQLDKFIQRQGWPVIELEDYSDPLYPWKVRAELAASYIADEKERGEKLSVALRHIARHRGWRNPYAKVSSLYLPDEPSDAFKSIREEIKRASGQPVPETATVGQMVTLCELGTLKLRGEGGVLSARLQQSDHAREIQEICRMQEIGQELYRKIIDVVFAAESPKGSASSRVGKDPLQPGKNRALKASDAFQRYRIAALIGNLRVRVDGEKRILSVEEKNLVFDHLVNLAPKKEPEWVTIAEILGIDRGQLIGTATMTDDGERAGARPPTHDTNRSIVNSRIAPLVDWWKTASALEQHAMVKALSNAEVDDFDSPEGAKVQAFFADLDDDVHAKLDSLHLPVGRAAYSEDTLVRLTRRMLADGVDLYTARLQEFGIEPSWTPPAPRIGEPVGNPAVDRVLKTVSRWLESATKTWGAPERVIIEHVREGFVTEKRAREMDGDMRRRAARNAKLFQEMQEKLNVQGKPSRADLWRYQSVQRQNCQCAYCGSPITFSNSEMDHIVPRAGQGSTNTRENLVAVCHRCNQSKGNTPFAIWAKNTSIEGVSVKEAVERTRHWVTDTGMRSTDFKKFTKAVVERFQRATMDEEIDARSMESVAWMANELRSRVAQHFASHGTTVRVYRGSLTAEARRASGISGKLEFLDGVGKSRLDRRHHAIDAAVIAFTSDYVAETLAVRSNLKQSQAHRQEAPQWREFTGKDAEHRAAWRVWCQKMEKLSALLTEDLRDDRVVVMSNVRLRLGNGSAHEETIGKLSKVKLGSQLSVSDIDKASSEALWCALTREPDFDPKDGLPANPERHIRVNGTHVYAGDNIGLFPVSAGSIALRGGYAELGSSFHHARVYKITSGKKPAFAMLRVYTIDLLPYRNQDLFSVELKPQTMSMRQAEKKLRDALATGNAEYLGWLVVDDELVVDTSKIATDQVKAVEAELGTIRRWRVDGFFGDTRLRLRPLQMSKEGIKKESAPELSKIIDRPGWLPAVNKLFSEGNVTVVRRDSLGRVRLESTAHLPVTWKVQ

SEQ ID NO: 398 - protein, 1084 aa, Corynebacterium diphtheriae
MKYHVGIDVGTFSVGLAAIEVDDAGMPIKTLSLVSHIHDSRLDPDKIKSAVTRLASSGIARRTRRLYRRKRRRLQQLDKFIQRQGWPVIELEDYSDPLYPWKVRAELAASYIADEKERGEKLSVALRHIARHRGWRNPYAKVSSLYLPDEPSDAFKAIREEIKRASGQPVPETATVGQMVTLCELGTLKLRGEGGVLSARLQQSDHAREIQEICRMQEIGQELYRKIIDVVFAAESPKGSASSRVGKDPLQPGKNRALKASDAFQRYRIAALIGNLRVRVDGEKRILSVEEKNLVFDHLVNLAPKKEPEWVTIAEILGIDRGQLIGTATMTDDGERAGARPPTHDTNRSIVNSRIAPLVDWWKTASALEQHAMVKALSNAEVDDFDSPEGAKVQAFFADLDDDVHAKLDSLHLPVGRAAYSEDTLVRLTRRMLADGVDLYTARLQEFGIEPSWTPPAPRIGEPVGNPAVDRVLKTVSRWLESATKTWGAPERVIIEHVREGFVTEKRAREMDGDMRRRAARNAKLFQEMQEKLNIQGKPSRADLWRYQSVQRQNCQCAYCGSPITFSNSEMDHIVPRAGQGSTNTRENLVAVCHRCNQSKGNTPFAIWAKNTSIEGVSVKEAVERTRHWVTDTGMRSTDFKKFTKAVVERFQRVTMDEEIDARSMESVAWMANELRSRVAQHFASRGTTVRVYRGSLTAEARRASGISGKLEFLDGVGKSRLDRRHHAIDAAVIAFTSDYVAETLAVRSNLKQSQAHRQEAPQWREFTGKDAEHRAAWRVWCQKMEKLSALLTEDLRDDRVVVMSNVRLRLGNGSAHEETIGKLSKVKLGSQLSVSDIDKASSEALWCALTREPDFDPKDGLPANPERHIRVNGTHVYAGDNIGLFPVSAGSIALRGGYAELGSSFHHARVYKITSGKKPAFAMLRVYTIDLLPYRNQDLFSVELKPQTMSMRQAEKKLRDALATGNAEYLGWLVVDDELVVDTSKIATDQVKAVEAELGTIRRWRVDGFFGDTRLRLRPLQMSKEGIKKESAPELSKIIDRPGWLPAVNKLFSEGNVTVVRRDSLGRVRLESTAHLPVTWKVQ

SEQ ID NO: 399 - protein, 1069 aa, Corynebacterium matruchotii
MAAIAIDDDGKPTEILSAISLIHDSGVDPDSAKSAATRLATSGIARRTRRLYRRKRKRLAKLDKFISSQGWPLKEFEKYEDPFYPWRVRAELATTAITDQQELGEKLSIALRHIARHRGWRNPYSKVTALYTVTEPSDAFLAMQEECAKQLGRTIPETITVGQLVTGMNLGKTRLRGENSLLAARPRQSDNANEIHTIAKVQGLSNELVRQIIDHVFAAESPKGSAAEQVGKDPLQPTKKRALKASDAFQQYRIAALIGNLRIRGGKGNRRLTTEETRLVFDYLRSLPAKQEPTWQLVAEQLKIDRGNLVGTAIMTDDGERAGAKPPVHDTNRIMENTKIKPLATWWKSADADARAAMVKALSNAEVDDFDSQAGAQVQEFFFGISDEDQEKLDGLHLPIGRAAYSEDTLDRLTKRMIGEGMDLYEARQAEFKISNDWAPPAPEIGERVGNPAVDRVLKATARWLNAAERQWGAPKSVNIEHVRAAFMSESSARELDRDNQQRAKRNVKVVAEMQEKLGIEGRPSRADVWRFQSIQRQNGKCAYCGAEISFKNSEMDHIIPQVGEGSTNTRDNLVAVCRECNSSKSNIAFAVWAENTSRPGVSVQKAIERTHHWVTDSGLRKPEFDKFRKQVCDRLRRKATDEPIDARSLESVAWMANELRSRIAQKFKDGDTKVRVYKGALTAEARRASGISGKLEFVDGKGKSRLDRRHHAVDAAVVAFTSNYVAETLALRSNMKFDQELRRKAPQWREFTGSDHVHQVEWTKWKYRMQALAELLNNALVQDRIVVMHNLRLRLGNGAAHEDTIGKLTRLKVGDAISTTDIDRASSEALWCALTRDPDYDPKTGLPENPNRTIRIHGTHLTASDEITVFPVAAASIPIRDGFAKLGSNYHHVRLFRVPSGKKYKYCLMQVYTVDLLKFRKEDLFTVELKPQTISVRTCEALLRKALANGTAEYLGWLVSDDELLIDTSSFDTPGIVKLREEYGPVNRWRLAGLTSVTRLNLRPLYLSKEGLKPNVNPEIKKIIDNRSWIITVNKLFSSGHVKIIRRDALGRPRLHSAAHLPICWEVK

SEQ ID NO: 400 - protein, 210 aa, Diplosphaera colitermitum
MSDILDKPIVLSLNRAWQVIGHRTVKQALVALNGGNADLPPALGLDIAYPKFDDGAWNFDRPLFLNPLPWSEWIELPVRDFDFAITTPRLRIRVPTVIVATQFAKMPVRIPRLTREAIFERDGGVCQYTGEHVGKHGGNLDHVVPRDRGGRDSFENLVWAKREINSLKANRLPHEAGLRLLRRPKAPAPLPASMTIREARHPDWRHFLTP

SEQ ID NO: 401 - protein, 1332 aa, Dolosigranulum pigrum
MQKNYTIGLDIGTNSVGWAVMKDDYTLIRKRMKVLGNTDIKKIKKNFWGVRLFDEGETAKETRLKRGTRRRYQRRRNRLIYLQDIFQQPMLAIDENFFHRLDDSFFVPDDKSYDRHPIFGSLEEEVAYHNTYPTIYHLRKHLADNPEKADLRLVYTALAHIVKYRGHFLIEGELNTENTSISETFEQFLDTYSDIFKEQLVGDISKVEEILSSKQSRSRKHEQIMALFPNENKLGNFGRFMMLIVGNTSNFKPVFDLDDEYKLKLSDETYEEDLDTLLGMTDDVFLDVFMAAKNVYDAVEMSAIISTDTGNSKAVLSNQMINFYDEHKVDLAQLKQFFKTHLPDKYYECFSDPSKNGYAGYIDGKTNQEDFYKYIEKVMKTIKSDKKDYFLDKIDREVFLRKQRSFYNSVIPHQIHLQEMQAILDRQSQYYPFLAENRDKIESLVTFRIPYYVGPLTVSDQSEFAWMERQSDEPIRPWNFDEIVNKERSAEKFIERMTNMDTYLLEEKVLPKRSLLYQTFEVYNELTKVRYTNEQGKTEKLNRQQKAEIIETLFKQKNRVREKDIANYLEQYGYVDGTDIKGVEDKFNASLSTYNDLAKIDGAKAYLDDPEYADVWEDIIKILTIFEDKAMRKKQLQTYSDTLSPEILKKLERKHYTGWGRFSKKLINGLRDEGSNKTILDYLKSDEGSSGPTNRNFMQLIRDNTLSFKKKIEDAQTIEDTTHIYDTVAELPGSPAIKKGIRQALKIVEEIIDIIGYEPENIVVEMARESQTTKKGKDLSKERLEKLTEAIKEFDGPSDVKVKDLKNENLRNDRLYLYYLQNGRDMYTNEPLDINNLSKYDIDHIIPQSFTTDNSIDNKVLVSRTKNQGNKSDDVPSINIVHKMKPFWRQLHKAGLISDRKFKNLTKAEHGGLTEADRAHFLNRQLVETRQITKHVANLLDSQYNTAEEQRINIVLLKSSMTSRFRKEFKLYKVREINDYHHGHDAYLNAVVATTIMKVYPNLKPQFVYGQYKKTSMFKEEKATARKHFYSNITKFFKKEKVVNEETGEILWDTERHLSTIKRVLSWKQMNIVKKVEKQKGQLWKETIYPKGDSSKLIPVKEGMDPQKYGGLSQVSEAFAVVITHEKGKKKQLKSDLISIPIVDQKAYEQHPTAYLEEAGYNNPTVLHELFKYQLFELEDGSRRMIASAKEFQKGNQMVLPLELVELLYHANRYDKVKFPDSIEYVHDNLAKFDDLLEYVIDFSNKYINADKNVQKIQKIYKEHGTEDVELTVESFVNLMTFTAMGAPATFKFYGESITRSRYTSITEFRGSTLIFQSITGLYETRYKLEDN

SEQ ID NO: 402 - protein, 921 aa, Enterococcus faecalis
MIPHQIHLAELQAIIHRQAAYYPFLKENQEKIEQLVTFRIPYYVGPLSKGDASTFAWLKRQSEEPIRPWNLQETVDLDQSATAFIERMTNFDTYLPSEKVLPKHSLLYEKFMVFNELTKISYTDDRGIKANFSGKEKEKIFDYLFKTRRKVKKKDIIQFYRNEYNTEIVTLSGLEEDQFNASFSTYQDLLKCGLTRAELDHPDNAEKLEDIIKILTIFEDRQRIRTQLSTFKGQFSAEVLKKLERKHYTGWGRLSKKLINGIYDKESGKTILGYLIKDDGVSKHYNRNFMQLINDSQLSFKNAIQKAQSSEHEETLSETVNELAGSPAIKKGIYQSLKIVDELVAIMGYAPKRIVVEMARENQTTSTGKRRSIQRLKIVEKAMAEIGSNLLKEQPTTNEQLRDTRLFLYYMQNGKDMYTGDELSLHRLSHYDIDHIIPQSFMKDDSLDNLVLVGSTENRGKSDDVPSKEVVKDMKAYWEKLYAAGLISQRKFQRLTKGEQGGLTLEDKAHFIQRQLVETRQITKNVAGILDQRYNANSKEKKVQIITLKASLTSQFRSIFGLYKVREVNDYHHGQDAYLNCVVATTLLKVYPNLAPEFVYGEYPKFQTFKENKATAKAIIYTNLLRFFTEDEPRFTKDGEILWSNSYLKTIKKELNYHQMNIVKKVEVQKGGFSKESIKPKGPSNKLIPVKNGLDPQKYGGFDSPIVAYTVLFTHEKGKKPLIKQEILGITIMEKTRFEQNRILFLEEKGFLRPRVLMKLPKYTLYEFPEGRRRLLASAKEAQKGNQMVLPEHLLTLLYHAKQCLLPNQSESLTYVEQHQPEFQEILERVVDFAEVHTLAKSKVQQIVKLFEANQTADVKEIAASFIQLMQFNAMGAPSTFKFFQKDIERARYTSIKEIFDATIIYQSTTGLYETRRKVVD

SEQ ID NO: 403 - protein, 1337 aa, Enterococcus faecalis; identical to SEQ ID NO: 115

SEQ ID NO: 404 - protein, 1337 aa, Enterococcus faecalis
MKKDYVIGLDIGTNSVGWAVMTEDYQLVKKKMPIYGNTEKKKIKKNFWGVRLFEEGHTAEDRRLKRTARRRISRRRNRLRYLQAFFEEAMTALDENFFARLQESFLVPEDKKWHRHPIFAKLEDEVAYHETYPTIYHLRKKLADSSEQADLRLIYLALAHIVKYRGHFLIEGKLSTENISVKEQFQQFMIIYNQTFVNGESRLVSAPLPESVLIEEELTEKASRTKKSEKVLQQFPQEKANGLFGQFLKLMVGNKADFKKVFGLEEEAKITYASESYEEDLEGILAKVGDEYSDVFLAAKNVYDAVELSTILADSDKKSHAKLSSSMIVRFTEHQEDLKNFKRFIRENCPDEYDNLFKNEQKDGYAGYITHAGKVSQLKFYQYVKKIIQDIAGAEYFLEKIAQENFLRKQRTFDNGVIPHQIHLAELQAIIHRQAAYYPFLKENQEKIEQLVTFRIPYYVGPLSKGDANTFAWLKRQSEEPIRPWNLQETVDLDQSATAFIERMTNFDTYLPSEKVLPKHSLLYEKFMVFNELTKISYTDDRGIKANFSGKEKEKIFDYLFKTRRKVKKKDIIQFYRNEYNTEIVTLSGLEEDQFNASFSTYQDLLKCGLTRAELDHPDNAEKLEDIIKILTIFEDRQRIRTQLSTFKGQFSAEVLKKLERKHYTGWGRLSKKLINGIYDKESGKTILDYLIKDDGVSKHYNRNFMQLINDSQLSFKNAIQKAQSSEHEETLSETVNELAGSPAIKKGIYQSLKIVDELVAIMGYAPKRIVVEMARENQTTSTGKRRSIQRLKIVEKAMAEIGSNLLKEQPTTNEQLRDTRLFLYYMQNGKDMYTGDELSLHRLSHYDIDHIIPQSFMKDDSLDNLVLVGSTENRGKSDDVPSKEVVKDMKAYWEKLYAAGLISQRKFQRLTKGEQGGLTLEDKAHFIQRQLVETRQITKNVAGILDQRYNAKSKEKKVQIITLKASLTSQFRSIFGLYKVREVNDYHHGQDAYLNCVVATTLLKVYPNLAPEFVYGEYPKFQTFKENKATAKAIIYTNLLRFFTEDEPRFTKDGEILWSNSYLKTIKKELNYHQMNIVKKVEVQKGGFSKESIKPKGPSNKLIPVKNGLDPQKYGGFDSPIVAYTVLFTHEKGKKPLIKQEILGITIMEKTRFEQNPILFLEEKGFLRPRVLMKLPKYTLYQFPEGRRRLLASAKEAQKGNQMVLPEHLLTLLYHAKQCLLPNQSESLAYVEQHQPEFQEILERVVDFAEVHTLAKSKVQQIVKLFEANQTADVKEIAASFIQLMQFNAMGAPSTFKFFQKDIERARYTSIKEIFDATIIYQSTTGLYETRRKVVD

SEQ ID NO: 405 - protein, 1337 aa, Enterococcus faecalis
MKKDYVIGLDIGTNSVGWAVMTEDYQLVKKKMPIYGNTEKKKIKKNFWGVRLFEEGHTAEDRRLKRTARRRISRRRNRLRYLQAFFEEAMTALDENFFARLQESFLVPEDKKWHRHPIFAKLEDEVAYHETYPTIYHLRKKLADSSEQADLRLIYLALAHIVKYRGHFLIEGKLSTENISVKEQFQQFMIIYNQTFVNGESRLVSTPLPESVLIEEELTEKASRTKKSEKVLQQFPQEKANGLFGQFLKLMVGNKADFKKVFGLEEEAKITYASESYEEDLEGILAKVGDEYSDVFLAAKNVYDAVELSTILADSDKKSHAKLSSSMIVRFTEHQEDLKNFKRFIRENCPDEYDNLFKNEQKDGYAGYITHAGKVSQLKFYQYVKKIIQDIAGAEYFLEKIAQENFLRKQRTFDNGVIPHQIHLAELQAIIHRQAAYYPFLKENQEKIEQLVTFRIPYYVGPLSKGDASTFAWLKRQSEEPIRPWNLQETVDLDQSATAFIERMTNFDTYLPSEKVLPKHSLLYEKFMVFNELTKISYTDDRGIKANFSGKEKEKIFDYLFKTRRKVKKKDIIQFYRNEYNTEIVTLSGLEEDQFNASFSTYQDLLKCGLTRAELDHPDNAEKLEDIIKILTIFEDRQRIRTQLSTFKGQFSAEVLKKLERKHYTGWGRLSKKLINGIYDKESGKTILDYLVKDDGVSKHYNRNFMQLINDSQLSFKNAIQKAQSSEHEETLSETVNELAGSPAIKKGIYQSLKIVDELVAIMGYAPKRIVVEMARENQTTSTGKRRSIQRLKIVEKAMAEIGSNLLKEQPTTNEQLRDTRLFLYYMQNGKDMYTGDELSLHRLSHYDIDHIIPQSFMKDDSLDNLVLVGSTENRGKSDDVPSKEVVKDMKAYWEKLYAAGLISQRKFQRLTKGEQGGLTLEDKAHFIQRQLVETRQITKNVAGILDQRYNAKSKEKKVQIITLKASLTSQFRSIFGLYKVREVNDYHHGQDAYLNCVVATTLLKVYPNLAPEFVYGEYPKFQTFKENKATAKAIIYTNLLRFFTEDEPRFTKDGEILWSNSYLKTIKKELNYHQMNIVKKVEVQKGGFSKESIKPKGPSNKLIPVKNGLDPQKYGGFDSPIVAYTVLFTHEKGKKPLIKQEILGITIMEKTRFEQNPILFLEEKGFLRPRVLMKLPKYTLYEFPEGRRRLLASAKEAQKGNQMVLPEHLLTLLYHAKQCLLPNQSESLAYVEQHQPEFQEILERVVDFAEVHTLAKSKVQQIVKLFEANQTADVKEIAASFIQLMQFNAMGAPSTFKFFQKDIERARYTSIKEIFDATIIYQSTTGLYETRRKVVD

SEQ ID NO: 406 - protein, 1337 aa, Enterococcus faecalis
MKKDYVIGLDIGTNSVGWAVMTEDYQLVKKKMPIYGNTEKKKIKKNFWGVRLFEEGHTAEDRRLKRTARRRISRRRNRLRYLQAFFEEAMTDLDENFFARLQESFLVPEDKKWHRHPIFAKLEDEVAYHETYPTIYHLRKKLADSSEQADLRLIYLALAHIVKYRGHFLIEGKLSTENISVKEQFQQFMIIYNQTFVNGESRLVSAPLPESVLIEEELTEKASRTKKSEKVLQQFPQEKANGLFGQFLKLMVGNKADFKKVFGLEEEAKITYASESYEEDLEGILAKVGDEYSDVFLAAKNVYDAVELSTILADSDKKSHAKLSSSMIVRFTEHQEDLKKFKRFIRENCPDEYDNLFKNEQKDGYAGYIAHAGKVSQLKFYQYVKKIIQDIAGAEYFLEKIAQENFLRKQRTFDNGVIPHQIHLAELQAIIHRQAAYYPFLKENQEKIEQLVTFRIPYYVGPLSKGDASTFAWLKRQSEEPIRPWNLQETVDLDQSATAFIERMTNFDTYLPSEKVLPKHSLLYEKFMVFNELTKISYTDDRGIKANFSGKEKEKIFDYLFKTRRKVKKKDIIQFYRNEYNTEIVTLSGLEEDQFNASFSTYQDLLKCGLTRAELDHPDNAEKLEDIIKILTIFEDRQRIRTQLSTFKGQFSAEVLKKLERKHYTGWGRLSKKLINGIYDKESGKTILGYLIKDDGVSKHYNRNFMQLINDSQLSFKNAIQKAQSSEHEETLSETVNELAGSPAIKKGIYQSLKIVDELVAIMGYAPKRIVVEMARENQTTSTGKRRSIQRLKIVEKAMAEIGSNLLKEQPTTNEQLRDTRLFLYYMQNGKDMYTGDELSLHRLSHYDIDHIIPQSFMKDDSLDNLVLVGSTENRGKSDDVPSKEVVKDMKAYWEKLYAAGLISQRKFQRLTKGEQGGLTLEDKAHFIQRQLVETRQITKNVAGILDQRYNANSKEKKVQIITLKASLTSQFRSIFGLYKVREVNDYHHGQDAYLNCVVATTLLKVYPNLAPEFVYGEYPKFQTFKENKATAKAIIYTNLLRFFTEDEPRFTKDGEILWSNSYLKTIKKELNYHQMNIVKKVEVQKGGFSKESIKPKGPSNKLIPVKNGLDPQKYGGFDSPIVAYTVLFTHEKGKKPLIKQEILGITIMEKTRFEQNPILFLEEKGFLRPRVLMKLPKYTLYEFPEGRRRLLASAKEAQKGNQMVLPEHLLTLLYHAKQCLLPNQSESLAYVEQHQPEFQEILERVVDFAEVHTLAKSKVQQIVKLFEANQTADVKEIAASFIQLMQFNAMGAPSTFKFFQKDIERARYTSIKEIFDATIIYQSTTGLYETRRKVVD

SEQ ID NO: 407 - protein, 936 aa, Enterococcus faecalis
MKKDYVIGLDIGTNSVGWAVMTEDYQLVKKKMPIYGNTEKKKIKKNFWGVRLFEEGHTAEDRRLKRTARRRISRRRNRLRYLQAFFEEAMTDLDENFFARLQESFLVPEDKKWHRHPIFAKLEDEVAYHETYPTIYHLRKKLADSSEQADLRLIYLALAHIVKYRGHFLIEGKLSTENISVKEQFQQFMIIYNQTFVNGESRLVSAPLPESVLIEEELTEKASRTKKSEKVLQQFPQEKANGLFGQFLKLMVGNKADFKKVFGLEEEAKITYASESYEEDLEGILAKVGDEYSDVFLAAKNVYDAVELSTILADSDKKSHAKLSSSMIVRFTEHQEDLKKFKRFIRENCPDEYDNLFKNEQKDGYAGYIAHAGKVSQLKFYQYVKKIIQDIAGAEYFLEKIAQENFLRKQRTFDNGVIPHQIHLAELQAIIHRQAAYYPFLKENQEKIEQLVTFRIPYYVGPLSKGDASTFAWLKRQSEEPIRPWNLQETVDLDQSATAFIERMTNFDTYLPSEKVLPKHSLLYEKFMVFNELTKISYTDDRGIKANFSGKEKEKIFDYLFKTRRKVKKKDIIQFYRNEYNTEIVTLSGLEEDQFNASFSTYQDLLKCGLTRAELDHPDNAEKLEDIIKILTIFEDRQRIRTQLSTFKGQFSAEVLKKLERKHYTGWGRLSKKLINGIYDKESGKTILGYLIKDDGVSKHYNRNFMQLINDSQLSFKNAIQKAQSSEHEETLSETVNELAGSPAIKKGIYQSLKIVDELVAIMGYAPKRIVVEMARENQTTSTGKRRSIQRLKIVEKAMAEIGSNLLKEQPTTNEQLRDTRLFLYYMQNGKDMYTGDELSLHRLSHYDIDHIIPQSFMKDDSLDNLVLVGSTENRGKSDDVPSKEVVKDMKAYWEKLYAAGLISQRKFQRLTKGEQGGLTLEDKAHFIQRQLVETR

SEQ ID NO: 408 - protein, 1337 aa, Enterococcus faecalis
MKKDYVIGLDIGTNSVGWAVMTEDYQLVKKKMPIYGNTEKKKIKKNFWGVRLFEEGHTAEDRRLKRTARRRISRRRNRLRYLQAFFEEAMTDLDENFFARLQESFLVPEDKKWHRHPIFAKLEDEVAYHETYPTIYHLRKKLADSSEQADLRLIYLALAHIVKYRGHFLIEGKLSTENISVKEQFQQFMIIYNQTFVNGESRLVSAPLPESVLIEEELTEKASRTKKSEKVLQQFPQEKANGLFGQFLKLMVGNKADFKKVFGLEEEAKITYASESYEEDLEGILAKVGDEYSDVFLAAKNVYDAVELSTILADSDKKSHAKLSSSMIVRFTEHQEDLKKFKRFIRENCPDEYDNLFKNEQKDGYAGYIAHAGKVSQLKFYQYVKKIIQDIAGAEYFLEKIAQENFLRKQRTFDNGVIPHQIHLAELQAIIHRQAAYYPFLKENQEKIEQLVTFRIPYYVGPLSKGDASTFAWLKRQSEEPIRPWNLQETVDLDQSATAFIERMTNFDTYLPSEKVLPKHSLLYEKFMVFNELTKISYTDDRGIKANFSGKEKEKIFDYLFKTRRKVKKKDIIQFYRNEYNTEIVTLSGLEEDQFNASFSTYQDLLKCGLTRAELDHPDNAEKLEDIIKILTIFEDRQRIRTQLSTFKGQFSAEVLKKLERKHYTGWGRLSKKLINGIYDKESGKTILDYLVKDDGVSKHYNRNFMQLINDSQLSFKNAIQKAQSSEHEETLSETVNELAGSPAIKKGIYQSLKIVDELVAIMGYAPKRIVVEMARENQTTSTGKRRSIQRLKIVEKAMAEIGSNLLKEQPTTNEQLRDTRLFLYYMQNGKDMYTGDELSLHRLSHYDIDHIIPQSFMKDDSLDNLVLVGSTENRGKSDDVPSKEVVKDMKAYWEKLYAAGLISQRKFQRLTKGEQGGLTLEDKAHFIQRQLVETRQITKNVAGILNQRYNANSKEKKVQIITLKASLTSQFRSIFGLYKVREVNDYHHGQDAYLNCVVATTLLKVYPNLAPEFVYGEYPKFQTFKENKATAKAIIYTNLLRFFTEDEPRFTKDGEILWSNSYLKTIKKELNYHQMNIVKKVEVQKGGFSKESIKPKGPSNKLIPVKNGLDPQKYGGFDSPVVAYTVLFTHEKGKKPLIKQEILGITIMEKTRFEQNPILFLEEKGFLRPRVLMKLPKYTLYEFPEGRRRLLASAKEAQKGNQMVLPEHLLTLLYHAKQCLLPNQSESLAYVEQHQPEFQEILERVVDFAEVHTLAKSKVQQIVKLFEANQTADVKEIAASFIQLMQFNAMGAPSTFKFFQKDIERARYTSIKEIFDATIIYQSTTGLYETRRKVVD

SEQ ID NO: 409 - protein, 1337 aa, Enterococcus faecalis
MKKDYVIGLDIGTNSVGWAVMTEDYQLVKKKMPIYGNTEKKKIKKNFWGVRLFEEGHTAEDRRLKRTARRRISRRRNRLRYLQAFFEEAMTDLDENFFARLQESFLVPEDKKWHRHPIFAKLEDEVAYHETYPTIYHLRKKLADSSEQADLRLIYLALAHIVKYRGHFLIEGKLSTENISVKEQFQQFMIIYNQTFVNGESRLVSAPLPESVLIEEELTEKASRTKKSEKVLQQFPQEKANGLFGQFLKLMVGNKADFKKVFGLEEEAKITYASESYEEDLEGILAKVGDEYSDVFLAAKNVYDAVELSTILADSDKKSHAKLSSSMIVRFTEHQEDLKKFKRFIRENCPDEYDNLFKNEQKDGYAGYIAHAGKVSQLKFYQYVKKIIQDIAGAEYFLEKIAQENFLRKQRTFDNGVIPHQIHLAELQAIIHRQAAYYPFLKENQEKIEQLVTFRIPYYVGPLSKGDASTFAWLKRQSEEPIRPWNLQETVDLDQSATAFIERMTNFDTYLPSEKVLPKHSLLYEKFMVFNELTKISYTDDRGIKANFSGKEKEKIFDYLFKTRRKVKKKDIIQFYRNEYNTEIVTLSGLEEDQFNASFSTYQDLLKCGLTRAELDHPDNAEKLEDIIKILTIFEDRQRIRTQLSTFKGQFSAEVLKKLERKHYTGWGRLSKKLINGIYDKESGKTILGYLIKDDGVSKHYNRNFMQLINDSQLSFKNAIQKAQSSEHEETLSETVNELAGSPAIKKGIYQSLKIVDELVAIMGYAPKRIVVEMARENQTTSTGKRRSIQRLKIVEKAMAEIGSNLLKEQPTTNEQLRDTRLFLYYMQNGKDMYTGDELSLHRLSHYDIDHIIPQSFMKDDSLDNLVLVGSTENLGKSDDVPSKEVVKDMKAYWEKLYAAGLISQRKFQRLTKGEQGGLTLEDKAHFIQRQLVETRQITKNVAGILDQRYNANSKEKKVQIITLKASLTSQFRSIFGLYKVREVNDYHHGQDAYLNCVVATTLLKVYPNLAPEFVYGEYPKFQTFKENKATAKAIIYTNLLRFFTEDEPRFTKDGEILWSNSYLKTIKKELNYHQMNIVKKVEVQKGGFSKESIKPKGPSNKLIPVKNGLDPQKYGGFDSPIVAYTVLFTHEKGKKPLIKQEILGITIMEKTRFEQNPILFLEEKGFLRPRVLMKLPKYTLYEFPEGRRRLLASAKEAQKGNQMVLPEHLLTLLYHAKQCLLPNQSESLAYVEQHQPEFQEILERVVDFAEVHTLAKSKVQQIVKLFEANQTADVKEIAASFIQLMQFNAMGAPSTFKFFQKDIERARYTSIKEIFDATIIYQSTTGLYETRRKVVD

SEQ ID NO: 410 - protein, 1337 aa, Enterococcus faecalis
MKKDYVIGLDIGTNSVGWAVMTEDYQLVKKKMPIYGNTEKKKIKKNFWGVRLFEEGHTAEDRRLKRTARRRISRRRNRLRYLQAFFEEAMTDLDENFFARLQESFLVPEDKKWHRHPIFAKLEDEVAYHETYPTIYHLRKKLADSSEQADLRLIYLALAHIVKYRGHFLIEGKLSTENTSVKEQFQQFMVIYNQTFVNGESRLVSAPLPESVLIEEELTEKASRTKKSEKVLQQFPQEKANGLFGQFLKLMVGNKADFKKVFGLEEEAKITYASESYEEDLEGILAKVGDEYSDVFLAAKNVYDAVELSTILADSDKKSHAKLSSSMIVRFTEHQEDLKKFKRFIRENCPDEYDNLFKNEQKDGYAGYIAHAGKVSQLKFYQYVKKIIQDIAGAEYFLEKIAQENFLRKQRTFDNGVIPHQIHLAELQAIIHRQAAYYPFLKENQEKIEQLVTFRIPYYVGPLSKGDASTFAWLKRQSEEPIRPWNLQETVDLDQSATAFIERMTNFDTYLPSEKVLPKHSLLYEKFMVFNELTKISYTDDRGIKANFSGKEKEKIFDYLFKTRRKVKKKDIIQFYRNEYNTEIVTLSGLEEDQFNASFSTYQDLLKCGLTRAELDHPDNAEKLEDIIKILTIFEDRQRIRTQLSTFKGQFSAEVLKKLERKHYTGWGRLSKKLINGIYDKESGKTILDYLVKDDGVSKHYNRNFMQLINDSQLSFKNAIQKAQSSEHEETLSETVNELAGSPAIKKGIYQSLKIVDELVAIMGYAPKRIVVEMARENQTTSTGKRRSIQRLKIVEKAMAEIGSNLLKEQPTTNEQLRDTRLFLYYMQNGKDMYTGDELSLHRLSHYDIDHIIPQSFMKDDSLDNLVLVGSTENRGKSDDVPSKKVVKKMKAYWEKLYAAGLISQRKFQRLTKGEQGGLTLEDKAHFIQRQLVETRQITKNVAGILDQRYNAKSKEKKVQIITLKASLTSQFRSIFGLYKVREVNDYHHGQDAYLNCVVATTLLKVYPNLAPEFVYGEYPKFQAFKENKATAKTIIYTNLMRFFTEDEPRFTKDSEILWSNSYLKTIKKELNYHQMNIVKKVEVQKGGFSKESIKPKGPSNKLIPVKNGLDPQKYGGFDSPVVAYTVLFTHEKGKKPLIKQEILGITIMEKTRFEQNPILFLEEKGFLRPRVLMKLPKYTLYEFPEGRRRLLASAKEAQKGNQMVLPEHLLTLLYHAKQCLLPNQSESLAYVEQHQPEFQEILERVVDFAEVHTLAKSKVQQIVKLFEANQTADVKEIAASFIQLMQFNAMGAPSTFKFFQKDIERARYTSIKEIFDATIIYQSTTGLYETRRKVVD

SEQ ID NO: 411 - protein, 1150 aa, Enterococcus faecalis
MYSIGLDLGISSVGWSVIDERTGNVIDLGVRLFSAKNSEKNLERRTNRGGRRLIRRKTNRLKDAKKILAAVGFYEDKSLKNSCPYQLRVKGLTEPLSKGEIYKVTLHILKKRGISYLDEDDTEAAKESQDYKEQVRENAQLLTKYTPGQIQLQRLKENNRVKTGINAQGNYQLNVFKVSAYANELATILKTQQAFYPNELTDDWIALFVQPGIAEEAGLIYRKRPYYHGPGNEANNSPYGRWSDFKKTGQPATNIFDKLIGKDFQGELRASGLSLSAQQYNLLNDLTNLKIDGEIPLSPEQKEYILAELMTKEFTRFGVNDVVKLLGVKKERLSGWRLDKKGKPEIHTLKGYRNWRKIFAESGIDLAMLPTETIDCLAKILTLNTEREGIENTLAFELPELAESVKLLVLDRYKELSQSVSTQAWHRFSLKTLHLLIPELMNATSEQNTLLEQFQLKSDVRKRYSEYKKLPTKDVLTEIYNPTVNKTVSQAFKVIDALLVKYGKEQIRYITIEMPRDDNEEDEKKRIKELHAKNSQRKNDSQSYFMQKSGWSQEKFQTTIQKNRRFLAKLLYYYEQDGICAYTGLSISPELLVSDSTEIDHIIPISISLDDSINNKVLVLSKANQVKGQQTPYDAWMDGSFKKINGKFSNWDDYQKWVESRHFSHKKENNLLETRNIFDSEQVEKFLARNLNDTRYASRLVLNTLQSFFANQETKVRVVNGSFTHTLRKKWGADLDKTRETHHHHAVDATLCAVTPFVKVSRYHYAVKEETGEKVMREIDFETGEIVDEMSYREFKKSKKYERKTYQVKWPNFREQLKPVNLHPRIKFSHQVDRKANRKLSDATIYSVREKTEVKTLKSGKQKITTDEYTIGKIKDIYTVDGWEAFKKKQDKLLMKDLDEKTYERLLSIAETTPDFQEVEEKNGKVKRVKRSPFAVYCEENDIPAIRKYAKKNNGPLIRSLKYYDGKLNKHINITKDSQGRPVEKTKNGRKVTLQSLKPYRYDIYQDLETKAYYTVQLYYSDLRFVEGKYGITEKEYMKKVAEQTKGQVVRFCFSLQKNDGLEIEWKDSQRYDVRFYNFQSANSINFKGLEQEMMPAENQFKQKPYNNGAINLNIAKYGKEGKKLRKFNTDILGKKHYLYYEKEPKNIIK

SEQ ID NO: 412 - protein, 1150 aa, Enterococcus faecalis
MYSIGLDLGISSVGWSVIDERTGNVIDLGVRLFSAKNSEKNLERRTNRGGRRLIRRKTNRLKDAKKILAAVGFYEDKSLKNSCPYQLRVKGLTEPLSKGEIYKVTLHILKKRGISYLDEDDTEAAKESQDYKEQVRKNAQLLTKYTPGQIQLQRLKENNRVKTGINAQGNYQLNVFKVSAYANELATILKTQQAFYPNELTDDWIALFVQPGIAEEAGLIYRKRPYYHGPGNEANNSPYGRWSDFKKTGQPATNIFDRLIGKDFQGELRASGLSLSAQQYNLLNDLTNLKIDGEIPLSPEQKEYILAELMTKEFTRFGVNDVAKLLGVKKERLSGWRLDKKGKPEIHTLKGYRNWRKIFAESGIDLATLPTETIDCLAKVLTLNTEHEGIENTLAFELPELAESVKLLVLDRYKELSQSVSTQAWHRFSLKTLHLLIPELMNATSEQNTLLEQFQLKSDVRKRYSEYKKLPTKDVLTEIYNPTVNKTVSQAFKVIDALLVKYGKEQIRYITIEMPRDDNEEDEKKRIKELHAKNSQRKNDSQSYFMQKSGWSQEKFQTTIQKNRRFLAKLLYYYEQDGICAYTGLSISPELLVSDSTEIDHIIPISISLDDSINNKVLVLSKANQVKGQQTPYDAWMDGSFKKINGKFSNWDDYQKWVESRHFSHKKENNLLETRNIFDSEQVEKFLARNLNDTRYASRLVLNTLQSFFANHETKVRVVNGSFTHTLRKKWGADLDKTRETHHHHAVDATLCAVTPFVKVSRYHYAVKEETGEKVMREIDFETGEIVDEMSYQEFKKSKKYERKTYQVKWPNFREQLKPVNLHPRIKFSHQVDRKANRKLSDATIYSVREKTEVKTLKSGKQKITTDEYTIGKIKDIYTVDGWEAFKKKQDKLLMKDLDEKTYERLLSIAETTPDFQEVEEKNGKVKRVKRSPFAVYCEENDIPAIQKYAKKNNGPLIRSLKYYDGKLNKHINITKDSQGRPVEKTKNGRKVTLQSLKPYRYDIYQDLETKAYYTVQLYYSDLRFVEGKYGITEKEYMKKVAEQTKGQVVRFCFSLQKNDGLEIEWKDSQRYDVRFYNFQSANSINFKGLEQEMMPAENQFKQKPYNNGAINLNIAKYGKEGKKLRKFNTDILGKKHYLYYEKEPKNIIK

SEQ ID NO: 413 - protein, 1150 aa, Enterococcus faecalis
MYSIGLDLGISSVGWSVIDERTGNVIDLGVRLFSAKNSEKNLERRTNRGGRRLIRRKTNRLKDAKKILAAVGFYEDKSLKNSCPYQLRVKGLTEPLSKGEIYKVTLHILKKRGISYLDEDDTEAAKESQDYKEQVRKNAQLLTKYTPGQIQLQRLKENNRVKTGINVQGNYQLNVFKVSAYANELATILKTQQAFYPNELTDDWIALFVQPGIAEEAGLIYRKRPYYHGPGNEANNSPYGRWSDFQKTGEPATNIFDKLIGKDFQGELRASGLSLSAQQYNLLNDLTNLKIDGEVPLSSEQKEYILTELMTKEFTRFGVNDVVKLLGVKKERLSGWRLDKKGKPEIHTLKGYRNWRKIFAEAGIDLATLPTETIDCLAKVLTLNTEREGIENTLAFELPELSESVKLLVLDRYKELSQSISTQSWHRFSLKTLHLLIPELMNATSEQNTLLEQFQLKSDVRKRYSEYKKLPTKDVLAEIYNPTVNKTVSQAFKVIDALLVKYGKEQIRYITIEMPRDDNEEDEKKRIKELHAKNSQRKNDSQSYFMQKSGWSQEKFQTTIQKNRRFLAKLLYYYEQDGICAYTGLPISPELLVSDSTEIDHIIPISISLDDSINNKVLVLSKANQVKGQQTPYDAWMDGSFKKINGKFSNWDDYQKWVESRHFSHKKENNLLETRNIFDSEQVEKFLARNLNDTRYASRLVLNTLQSFFTNQETKVRVVNGSFTHTLRKKWGADLDKTRETHHHHAVDATLCAVTPFVKVSRYHYAVKEETGEKVMREIDFETGEIVNEMSYREFKKSKKYERKTYQVKWPNFREQLKPVNLHPRIKFSHQVDRKANRKLSDATIYSVREKTEVKTLKSGKQKITTDEYTIGKIKDIYTLDGWEAFKKKQDKLLMKDLDEKTYERLLSIAETTPDFQEVEEKNGKVKRVKRSPFAVYCEENDIPAIQKYAKKNNGPLIRSLKYYDGKLNKHINITKDSQGRPVEKTKNGRKVTLQSLKPYRYDIYQDLETKAYYTVQLYYSDLRFVEGKYGITEKEYMKKVAEQTKGQVVRFCFSLQKNDGLEIEWKDSQRYDVRFYNFQSANSINFKGLEQEIMPAENQFKQKPYNNGAINLNIAKYGKEGKKLRKFNTDILGKKHYLFYEKEPKNIIK

SEQ ID NO: 414 - protein, 1150 aa, Enterococcus faecalis; identical to SEQ ID NO: 183

SEQ ID NO: 415 - protein, 1150 aa, Enterococcus faecalis; identical to SEQ ID NO: 184

SEQ ID NO: 416 - protein, 1340 aa, Enterococcus faecium
MKKEYTIGLDIGTNSVGWSVLTDDYRLVSKKMKVAGNTEKSSTKKNFWGVRLFDEGQTAEARRSKRTARRRLARRRQRILELQKIFAPEILKIDEHFFARLNESFLVLDEKKQSRHPVFATIKQEKSYHQTYPTIYHLRQALADSSEKADIRLVYLAMAHLLKYRGHFLIEGELNTENSSVTETFRQFLSTYNQQFSEADDKQTEKLDEAVDCSFVFTEKMSKTKKAETLLKYFPHEKSNGYLSQFIKLMVGNQGNFKNVFGLEEEAKLQFSKETYEEDLEELLEKIGDDYIDLFVQAKNVYDAVLLSEILSDSTKNTRAKLSAGMIRRYDAHKEDLVLLKRFVKENLPKKYRAFFGDNSVNGYAGYIEGHATQEDFYKFVKKELTGIRGSEVFLTKIEQENFLRKQRTFDNGVIPHQIHLTELRAIIANQKKHYPFLKEEQEKLESLLTFKIPYYVGPLAKKQENSPFAWLIRKSEEKIKPWNLPEIVDMEGSAVRFIERMNNTDMYIPHNKVLPKNSLLYQKFSIYNELTKVRYQDERGQMNYFSSIEKKEIFHELFEKNRKVTKKDLQEFLYLKYDIKHAELSGIEKAFNASYTTYHDFLTMSENKREMKQWLEDPELASMFEEIIKTLTVFEDREMIKTRLSHHEATLGKHIIKKLTKKHYTGWGRLSKELIQGIRDKQSNKTILDYLINDDDFPHHRNRNFMQLINDDSLSFKKEIKKAQMITDTENLEEIVKELTGSPAIKKGILQSLKIVDEIVGIMGYEPANIVVEMARENQTTGRGLKSSRPRLKALEESLKDFGSQLLKEYPTDNSSLQKDRLYLYYLQNGRDMYTGAPLDIHRLSDYDIDHIIPRSFTTDNSIDNKVLVSSKENRLKKDDVPSEKVVKKMRSFWYDLYSSKLISKRKLDNLTKIKLTEEDKAGFIKRQLVETRQITKHVAGILHHRFNKAEDTNEPIRKVRIITLKSALVSQFRNRFGIYKVREINEYHHAHDAYLNGVVALALLKKYPQLAPEFVYGEYLKFNAHKANKATVKKEFYSNIMKFFESDTPVCDENGEIFWDKSKSIAQVKKVINHHHMNIVKKTEIQKGGFSKETVEPKKDSSKLLPRKNNWDPAKYGGLGSPNVAYTVAFTYEKGKARKRTNALEGITIMEREAFEQSPVLFLKNKGYEQAEIEMKLPKYALFELENGRKRMVASNKEAQKANSFLLPEHLVTLLYHAKQYDEISHKESFDYVNEHHKEFSEVFARVLEFAGKYTLAEKNIEKLEKIYKENQTDDLAKLASSFVNLMQFNAMGAPADFKFFDVTIPRKRYTSLTEIWQSTIIHQSITGLYETRIRMGK

SEQ ID NO: 417 - protein, 1339 aa, Enterococcus faecium
MKKEYTIGLDIGTNSVGWSVLTDDYRLVSKKMKVAGNTEKSSTKKNFWGVRLFDEGQTAEARRSKRTARRRLARRRQRILELQKIFAPEILKIDEHFFARLNESFLVLDEKKQSRHPVFATIKQEKSYHQTYPTIYHLRQALADSSEKADIRLVYLAMAHLLKYRGHFLIEGELNTENSSVTETFRQFLSTYNQQFSEADDKQTEKLDEAVDCSFVFTEKMSKTKKAETLLKYFPHEKSNGYLSQFIKLMVGNQGNFKNVFGLEEAKLQFSKETYEEDLEELLEKIGDDYIDLFVQAKNVYDAVLLSEILSDSTKNTRAKLSAGMIRRYDAHKEDLVLLKRFVKENLPKKYRAFFGDNSVNGYAGYIEGHATQEDFYKFVKKELTGIRGSEVFLTKIEQENFLRKQRTFDNGVIPHQIHLTELRAIIANQKKHYPFLKEEQEKLESLLTFKIPYYVGPLAKKQENSPFAWLIRKSEEKIKPWNLPEIVDMEGSAVRFIERMINTDMYMPHNKVLPKNSLLYQKFSIYNELTKVRYQDERGQMNYFSSIEKKEIFHELFEKNRKVTKKDLQEFLYLKYDIKHAELSGIEKAFNASYTTYHDFLTMSENKREMKQWLEDPELASMFEEIIKTLTVFEDREMIKTRLSHHEATLGKHIIKKLTKKHYTGWGRLSKELIQGIRDKQSNKTILDYLINDDDFPHHRNRNFMQLINDDSLSFKKEIKKAQMITDTENLEEIVKELTGSPAIKKGILQSLKIVDEIVGIMGYEPANIVVEMARENQTTGRGLKSSRPRLKALEESLKDFGSQLLKEYPTDNSSLQKDRLYLYYLQNGRDMYTGAPLDIHRLSDYDIDHIIPRSFTTDNSIDNKVLVSSKENRLKKDDVPSEKVVKKMRSFWYDLYSSKLISKRKLDNLTKIKLTEEDKAGFIKRQLVETRQITKHVAGILHHRFNKAEDTNEPIRKVRIITLKSALVSQFRNRFGIYKVREINEYHHAHDAYLNGVVALALLKKYPQLAPEFVYGEYLKFNAHKANKATVKKEFYSNIMKFFESDTPVCDENGEIFWDKSKSIAQVKKVINHHHMNIVKKTEIQKGGFSKETVEPKKDSSKLLPRKNNWDPAKYGGLGSPNVAYTVAFTYEKGKARKRTNALEGITIMEREAFEQSPVLFLKNKGYEQAEIEMKLPKYALFELENGRKRMVASNKEAQKANSFLLPEHLVTLLYHAKQYDEISHKESFDYVNEHHKEFSEVFARVLEFAGKYTLAEKNIEKLEKIYKENQTDDLAKLASSFVNLMQFNAMGAPADFKFFDVTIPRKRYTSLTEIWQSTIIHQSITGLYETRIRMGK

SEQ ID NO: 418 - protein, 1340 aa, Enterococcus faecium
MKKEYTIGLDIGTNSVGWSVLTDDYRLVSKKMKVAGNTEKSSTKKNFWGVRLFDEGQTAEARRSKRTARRRLARRRQRILELQKIFAPEILKIDEHFFARLNESFLVLDEKKQSRHPVFATIKQEKSYHQTYPTIYHLRQALADSSEKADIRLVYLAMAHLLKYRGHFLIEGELNTENSSVTETFRQFLSTYNQQFSEADDKQTEKLDEAVDCSFVFTEKMSKTKKAETLLKYFPHEKSNGYLSQFIKLMVGNQGNFKNVFGLEEEAKLQFSKETYEEDLEELLEKIGDDYIDLFVQAKNVYDAVLLSEILSDSTKNTRAKLSAGMIRRYDAHKEDLVLLKRFVKENLPKKYRAFFGDNSVNGYAGYIEGHATQEDFYKFVKKELTGIRGSEVFLTKIEQENFLRKQRTFDNGVIPHQIHLTELRAIIANQKKHYPFLKEEQEKLESLLTFKIPYYVGPLAKKQENSPFAWLIRKSEEKIKPWNLPEIVDMEGSAVRFIERMINTDMYIPHNKVLPKNSLLYQKFSIYNELTKVRYQDERGQMNYFSSIEKKEIFHELFEKNRKVTKKDLQEFLYLKYDIKHAELSGIEKAFNASYTTYHDFLTMSENKREMKQWLEDPELASMFEEIIKTLTVFEDREMIKTRLSHHEATLGKHIIKKLTKKHYTGWGRLSKELIQGIRDKQSNKTILDYLINDDDFPHHRNRNFMQLINDDSLSFKKEIKKAQMITDTENLEEIVKELTGSPAIKKGILQSLKIVDEIVGIMGYEPANIVVEMARENQTTGRGLKSSRPRLKALEESLKDFGSQLLKEYPTDNSSLQKDRLYLYYLQNGRDMYTGAPLDIHRLSDYDIDHIIPRSFTTDNSIDNKVLVSSKENRLKKDDVPSEKVVKKMRSFWYDLYSSKLISKRKLDNLTKIKLTEEDKAGFIKRQLVETRQITKHVAGILHHRFNKAEDTNEPIRKVRIITLKSALVSQFRNRFGIYKVREINEYHHAHDAYLNGVVALALLKKYPQLAPEFVYGEYLKFNAHKANKATVKKEFYSNIMKFFESDTPVCDENGEIFWDKSKSIAQVKKVINHHHMNIVKKTEIQKGGFSKETVEPKKDSSKLLPRKNNWDPAKYGGLGSPNVAYTVAFTYEKGKARKRTNALEGITIMEREAFEQSPVLFLKNKGYEQAEIEMKLPKYALFELENGRKRMVASNKEAQKANSFLLPEHLVTLLYHAKQYDEISHKESFDYVNEHHKEFSEVFARVLEFAGKYTLAEKNIEKLEKIYKENQTDDLAKLASSFVNLMQFNAMGAPADFKFFDVTIPRKRYTSLTEIWQSTIIHQSITGLYETRIRMGK

SEQ ID NO: 419 - protein, 1340 aa, Enterococcus faecium
MKKEYTIGLDIGTNSVGWSVLTDDYRLVSKKMKVAGNTEKSSTKKNFWGVRLFDEGQTAEARRSKRTARRRLARRRQRILELQKIFAPEILKIDEHFFARLNESFLVLDEKKQSRHPVFATIKQEKSYHQTYPTIYHLRQALADSSEKADIRLVYLAMAHLLKYRGHFLIEGELNTENSSVTETFRQFLSTYNQQFSEADDKQTEKLDEAVDCSFVFTEKMSKTKKAETLLKYFPHEKSNGYLSQFIKLMVGNQGNFKNVFGLEEEAKLQFSKETYEEDLEELLEKIGDDYIDLFVQAKNVYDAVLLSEILSDSTKNTRAKLSAGMIRRYDAHKEDLVLLKRFVKENLPKKYRAFFGDNSVNGYAGYIEGHATQEDFYKFVKKELTGIRGSEVFLTKIEQENFLRKQRTFDNGVIPHQIHLTELRAIIANQKKHYPFLKEEQEKLESLLTFKIPYYVGPLAKKQENSPFAWLIRKSEEKIKPWNLPEIVDMEGSAVRFIERMINTDMYMPHNKVLPKNSLLYQKFSIYNELTKVRYQDERGQMNYFSSIEKKEIFHELFEKNRKVTKKDLQEFLYLKYDIKHAELSGIEKAFNASYTTYHDFLTMSENKREMKQWLEDPELASMFEEIIKTLTVFEDREMIKTRLSHHEATLGKHIIKKLTKKHYTGWGRLSKELIQGIRDKQSNKTILDYLINDDDFPHHRNRNFMQLINDDSLSFKKEIKKAQMITDTENLEEIVKELTGSPAIKKGILQSLKIVDEIVGIMGYEPANIVVEMARENQTTGRGLKSSRPRLKALEESLKDFGSQLLKEYPTDNSSLQKDRLYLYYLQNGRDMYTGAPLDIHRLSDYDIDHIIPRSFTTDNSIDNKVLVSSKENRLKKDDVPSEKVVKKMRSFWYDLYSSKLISKRKLDNLTKIKLTEEDKAGFIKRQLVETRQITKHVAGILHHRFNKAEDTNEPIRKVRIITLKSALVSQFRNRFGIYKVREINEYHHAHDAYLNGVVALALLKKYPQLAPEFVYGEYLKFNAHKANKATVKKEFYSNIMKFFESDTPVCDENGEIFWDKSKSIAQVKKVINHHHMNIVKKTEIQKGGFSKETVEPKKDSSKLLPRKNNWDPAKYGGLGSPNVAYTVAFTYEKGKARKRTNALEGITIMEREAFEQSPVLFLKNKGYEQAEIEMKLPKYALFELENGRKRMVASNKEAQKANSFLLPEHLVTLLYHAKQYDEISHKESFDYVNEHHKEFSEVFARVLEFAGKYTLAEKNIEKLEKIYKENQTDDLAKLASSFVNLMQFNAMGAPADFKFFDVTIPRKRYTSLTEIWQSTIIHQSITGLYETRIRMGK

SEQ ID NO: 420 - protein, 1339 aa, Enterococcus faecium
MKKEYTIGLDIGTNSVGWSVLTDDYRLVSKKMKVAGNTEKSSTKKNFWGVRLFDEGQTAEARRSKRTARRRLARRRQRILELQKIFAPEILKIDEHFFARLNESFLVLDEKKQSRHPVFATIKQEKSYHQTYPTIYHLRQALADSSEKADIRLVYLAMAHLLKYRGHFLIEGELNTENSSVTETFRQFLSTYNQQFSEADDKQTEKLDEAVDCSFVFTEKMSKTKKAETLLKYFPHEKSNGYLSQFIKLMVGNQGNFKNVFGLEEAKLQFSKETYEEDLEELLEKIGDDYIDLFVQAKNVYDAVLLSEILSDSTKNTRAKLSAGMIRRYDAHKEDLVLLKRFVKENLPKKYRAFFGDNSVNGYAGYIEGHATQEDFYKFVKKELTGIRGSEVFLTKIEQENFLRKQRTFDNGVIPHQIHLTELRAIIANQKKHYPFLKEEQEKLESLLTFKIPYYVGPLAKKQENSPFAWLIRKSEEKIKPWNLPEIVDMEGSAVRFIERMINTDMYIPHNKVLPKNSLLYQKFSIYNELTKVRYQDERGQMNYFSSIEKKEIFHELFEKNRKVTKKDLQEFLYLKYDIKHAELSGIEKAFNASYTTYHDFLTMSENKREMKQWLEDPELASMFEEIIKTLTVFEDREMIKTRLSHHEATLGKHIIKKLTKKHYTGWGRLSKELIQGIRDKQSNKTILDYLINDDDFPHHRNRNFMQLINDDSLSFKKEIKKAQMITDTENLEEIVKELTGSPAIKKGILQSLKIVDEIVGIMGYEPANIVVEMARENQTTGRGLKSSRPRLKALEESLKDFGSQLLKEYPTDNSSLQKDRLYLYYLQNGRDMYTGAPLDIHRLSDYDIDHIIPRSFTTDNSIDNKVLVSSKENRLKKDDVPSEKVVKKMRSFWYDLYSSKLISKRKLDNLTKIKLTEEDKAGFIKRQLVETRQITKHVAGILHHRFNKAEDTNEPIRKVRIITLKSALVSQFRNRFGIYKVREINEYHHAHDAYLNGVVALALLKKYPQLAPEFVYGEYLKFNAHKANKATVKKEFYSNIMKFFESDTPVCDENGEIFWDKSKSIAQVKKVINHHHMNIVKKTEIQKGGFSEETVEPKKDSSKLLPRKNNWDPAKYGGLGSPNVAYTVAFTYEKGKARKRTNALEGITIMEREAFEQSPVLFLKNKGYEQAEIEMKLPKYALFELENGRKRMVASNKEAQKANSFLLPEHLVTLLYHAKQYDEISHKESFDYVNEHHKEFSEVFARVLEFAGKYTLAEKNIEKLEKIYKENQTDDLAKLASSFVNLMQFNAMGAPADFKFFDVTIPRKRYTSLTEIWQSTIIHQSITGLYETRIRMGK

SEQ ID NO: 421 - protein, 1340 aa, Enterococcus faecium
MKKEYTIGLDIGTNSVGWSVLTDDYRLVSKKMKVAGNTEKSSTKKNFWGVRLFDEGQTAEARRSKRTARRRLARRRQRILELQKIFAPEILKIDEHFFARLNESFLVLDEKKQSRHPVFATIKQEKSYHQTYPTIYHLRQALADSSEKADIRLVYLAMAHLLKYRGHFLIEGELNTENSSVTETFRQFLSTYNQQFSEADDKQTEKLDEAVDCSFVFTEKMSKTKKAETLLKYFPHEKSNGYLSQFIKLMVGNQGNFKNVFGLEEEAKLQFSKETYEEDLEELLEKIGDDYIDLFVQAKNVYDAVLLSEILSDSTKNTRAKLSAGMIRRYDAHKEDLVLLKRFVKENLPKKYRAFFGDNSVNGYAGYIEGHATQEDFYKFVKKELTGIRGSEVFLTKIEQENFLRKQRTFDNGVIPHQIHLTELRAIIANQKKHYPFLKEEQEKLESLLTFKIPYYVGPLAKKQENSPFAWLIRKSEEKIKPWNLPEIVDMEGSAVRFIERMINTDMYIPHNKVLPKNSLLYQKFSIYNELTKVRYQDERGQMNYFSSIEKKEIFHELFEKNRKVTKKDLQEFLYLKYDIKHAELSGIEKAFNASYTTYHDFLTMSENKREMKQWLEDPELASMFEEIIKTLTVFEDREMIKTRLSHHEATLGKHIIKKLTKKHYTGWGRLSKELIQGIRDKQSNKTILDYLINDDDFPHHRNRNCMQLINDDSLSFKKEIKKAQMITDTENLEEIVKELTGSPAIKKGILQSLKIVDEIVGIMGYEPANIVVEMARENQTTGRGLKSSRPRLKALEESLKDFGSQLLKEYPTDNSSLQKDRLYLYYLQNGRDMYTGAPLDIHRLSDYDIDHIIPRSFTTDNSIDNKVLVSSKENRLKKDDVPSEKVVKKMRSFWYDLYSSKLISKRKLDNLTKIKLTEEDKAGFIKRQLVETRQITKHVAGILHHRFNKAEDTNEPIRKVRIITLKSALVSQFRNRFGIYKVREINEYHHAHDAYLNGVVALALLKKYPQLAPEFVYGEYLKFNAHKANKATVKKEFYSNIMKFFESDTPVCDENGEIFWDKSKSIAQVKKVINHHHMNIVKKTEIQKGGFSKETVEPKKDSSKLLPRKNNWDPTKYGGLGSPNVAYTVAFTYEKGKARKRTNALEGITIMEREAFEQSPVLFLKNKGYEQAEIEMKLPKYALFELENGRKRMVASNKEAQKANSFLLPEHLVTLLYHAKQYDEISHKESFDYVNEHHKEFSEVFARVLEFAGKYTLAEKNIEKLEKIYKENQTDDLAKLASSFVNLMQFNAMGAPADFKFFDVTIPRKRYTSLTEIWQSTIIHQSITGLYETRIRMGK

SEQ ID NO: 422 - protein, 892 aa, Enterococcus faecium
MTFKIPYYVGPLAKKQENSPFAWLIRKSEEKIKPWNLPEIVDMEGSAVRFIERMINTDMYMPHNKVLPKNSLLYQKFSIYNELTKVRYQDERGQMNYFSSIEKKEIFHELFEKNRKVTKKDLQEFLYLKYDIKHAELSGIEKAFNASYTTYHDFLTMSENKREMEQWLEDPELASMFEEIIKTLTVFEDREMIKTRLSHHKATLGKHIIKKLTKKHYTGWGRLSKELIQGIRDKQSNKTILDYLINDDDFPHHRNRNFMQLINDDSLSFKKEIKKAQMITDTENLEEIVKELTGSPAIKKGILQSLKIVDEIVGIMGYEPANIVVEMARENQTTGRGLKSSRPRLKALEESLKDFGSQLLKEYPTDNSSLQKDRLYLYYLQNGRDMYTGAPLDIHRLSDYDIDHIIPRSFTTDNSIDNKVLVSSKENRLKKDDVPSEKVVKKMRSFWYDLYSSKLISKRKLDNLTKIKLTEEDKAGFIKRQLVETRQITKHVAGILHHRFNKAEDTNEPIRKVRIITLKSALVSQFRNRFGIYKVREINEYHHAHDAYLNGVIALALLKKYPQLAPEFVYGEYLKFNAHKANKATVKKEFYSNIMKFFESDTPVCDENGEIFWDKSKSIAQVKKVINHHHMNIVKKTEIQKGGFSKETVEPKKDSSKLLPRKNNWDPAKYGGLGSPNVAYTVAFTYEKGKARKRTNALEGITIMEREAFEQSPVLFLKNKGYEQAEIEMKLPKYALFELENGRKRMVASNKEAQKANSFLLPEHLVTLLYHAKQYDEISHKESFDYVNEHHKEFSEVFARVLEFAGKYTLAEKNIEKLEKIYKENQTDDLAKLASSFVNLMQFNAMGAPADFKFFDVTIPRKRYTSLTEIWQSTIIHQSITGLYETRIRMGK

SEQ ID NO: 423 - protein, 1336 aa, Enterococcus hirae
MTKDYTIGLDIGTNSVGWAVLTDDYQLMKRKMSVHGNTEKKKIKKNFWGARLFDEGQTAEFRRTKRTNRRRLARRKYRLSKLQDLFAEELCKQDDCFFVRLEESFLVPEEKQYKPASIFPTLEEEKEYYQKYPTIYHLRQKLVDSTEKEDLRLVYLALAHLLKYRGHFLFEGDLDTENTSIEESFRVFLEQYSKQSDQPLIVHQPVLTILTDKLSKTKKVEEILKYYPTEKINSFFAQCLKLIVGNQANFKRIFDLEAEVKLQFSKETYEEDLESLLEKIGDEYLDIFLQAKKVHDAILLSEIISSTVKHTKAKLSSGMVERYERHKADLAKFKQFVKENVPQKATVFFKDTTKNGYAGYIKGKTTQEEFYKFVKKELSGVVGSEPFLEKIDQETFLLKQRTYTNGVIPHQVHLIELKAIIDQQKQHYPFLEEAGPKIIALFKFRIPYYVGPLAKEQEASSFAWIERKTAEKINPWNFSEVVDIEKSAMRFIQRMTKQDTYLPTEKVLPKNSLLYQKYMIFNELTKVSYKDERGVKQYFSGDEKQQIFKQLFQKERGKITVKKLQNFLYTHYHIENAQIFGIEKAFNASYSTYHDFMKLAKTNQKAMQEWLEQPEMEPIFEDIVKILTIFEDRQMIKHQLSKYQEVFGEKLLKEFARKHYTGWGRFSAKLIHGIRDRKTNKTILDYLINDDDVPANRNRNLMQLINDEHLSFKEEIAKATVFSKHKSLVDVIQDLPGSPAIKKGIWQSLKIVEELIAIIGYKPKNIVIEMARENQKTHRTSPRLKALENGLKQIGSTLLKEQPTDNKALQKERLYLYYLQNGRDMYTGEPLEIENLHQYEVDHIIPRSFIVDNSIDNKVLVASKQNQKKRDDVPKKQIVNEQRIFWNQLKEAKLISPKKYAYLTKIELTPEDKARFIQRQLVETRQITKHVANILHQSFNQEEEGTDCDGVQIITLKATLTSQFRQTFGLYKVREINPHHHAHDAYLNGFIANVLLKRYPKLAPEFVYGKYVKYSLARENKATAKKEFYSNILKFLESDEPFCDENGEIYWEKSHHLPRIKKVLSSHQVNVVKKVEQQKGGFYKETVNSKEKPDKLIERKNNWDVTKYGGFGSPVIAYAIAFVYAKGKTQKKTRAIEGITIMEQAAFEKDPTTFLKEKGFPQVTEFIKLPKYTLFEFDNGRRRFLASHKESQKGNPFILSDQLVTLLYHAQHYDKITYQESFDYVNTHLSDFSAILTEVLAFAEKYTLADKNIERIQELYEENKYGETSMIAQSFLQLLQFNAIGAPADFKFFGVTIPRKRYTSLTEIWDATIIYQSVTGLYETRIRMGDLWAGEQ

SEQ ID NO: 424 - protein, 116 aa, Enterococcus sp.
MYSIGLDLGISSVGWSVIDERTGNVIDLGVRLFSAKNSEKNLERRTNRGGRRLIRRKTNRLKDAKKILAAVGFYEDKSLKNSCPYQLRVKGLTELLSKGEIYKVTLHILKNVELVT

SEQ ID NO: 425 - protein, 1391 aa, Eubacterium sp.
MENKQYYIGLDVGTNSVGWAVTDTSYNLLRAKGKDMWGARLFDEAKTAVERRTKRTSRRRSEREKARKAMLKELFADEINKVDPNFFIRLEESKFFLDDRSENNRQRYTLFNDAKFTDKDYYEKYKTIFHLRSALINSDEKFDVRLVFLAILNLFSHRGHFLNASLKGDGEIQGVDIFYNDLYEVCEEFEIDLPQISNIDNFEKILSQKGKSRTKILEELSEELSISKKEKIKYSLLKLICGMKIKVVDIYADEDIQEDDKKKDLGFRESDYEKSSLEVKEIIGDDHFELIERAKAVHDIGLLANIIGNSKYLCEARVEAYDNHHKDLQKIKELLKKYDIKAYTDMFRKMTDKNYSAYVGSVNSNIAKERRSVDNRKIEDLYEYIKKIALKNISDDNEDKIEILKKIETGEFLKKQLTASNGVIPNQLQSRELRAILKKAENYLPFLKEKGEKNLTVSEMIIQLFEFQIPYYVGPLDKNPKKDKNANSWAVIPSGGRILPWNFEDKVDVKGSRKEFIEKMVRKCTYLSEEHTLPKQSLLYEKFMVLNEINNIKIDGEKISVEAKQKIYNDLFMKGKKVSQKAIKQELISLNIMSKDSVLSGIDTVCNAYLSSIAKFRGVFDENVNNQSTIDMIEDIIFLKTVYSDEKRFVKEEIVEKYGDEIDKDKIKRILGFKFSNWGNISKSFLELEGADVGTGEIRSIIQSLWETNFNLMELLSSRFTYMDELEKRVKKLEKPLSEWTIEDLDDMYLSSPVKRMIWQSMKIVDEIQTVIGYAPKRIFVEMTRSEGEKVRTKSRKDRLKELYSAIKEDSKQWVKELDAKDESYFRSKKMYLYYLQKGRCMYSGEVIELDKLMDDNLYDIDHIYPRSFVKDDSLDNLVLVKKEINNRKQNDPITPQIQASCQGFWKVLHEQGFISNEKYSRLTRKTQEFSDEEKLSFINRQIVETGQATKCMAQILQKSMGEDVDVVFSKARLVSEFRHKFELFKSRLINDFHHANDAYLNIVVGNSYFVKFTRNPANFIKDARKNPDNPAYKYHMDRFFERDVKSKSEVAWIGQSEGNAGTIAIVKKTMSKNSPLITKKVEEGHGSITKETIVGVKEIKFGRNKVEKADKTPKKANLQAYRPIKTSDERLCNILRYGGRTSISISGYCLVEYVKKRKTIRSLEAIPVYLGRKDSLSEEKLLNYFRYNLNDGGKDSVSDIRLCLPFISTNSLVKIDGYLYYLGGKNDDRIQLYNAYQLKMKKEEVEYIRKIEKAVSMSKFDEIDREKNPVLTEEKNIELYNKIQDKFENTVFSKRMSLVKYNKKDLSFGDFLKNKKSKFEEIDLEKQCKVLYNIIFNLSNLKEVDLSDIGGSKSTGKCRCKKNITNYKEFKLIQQSITGLYSCEKDLMTI

SEQ ID NO: 426 - protein, 1391 aa, Eubacterium yurii
MENKQYYIGLDVGTNSVGWAVTDTSYNLLRAKGKDMWGARLFEKANTAAERRTKRTSRRRSEREKARKAMLKELFADEINRVDPSFFIRLEESKFFLDDRSENNRQRYTLFNDATFTDKDYYEKYKTIFHLRSALINSDEKFDVRLVFLAILNLFSHRGHFLNASLKGDGDIQGMDVFYNDLVESCEYFEIELPRITNIDNFEKILSQKGKSRTKILEELSEELSISKKDKSKYNLIKLISGLEASVVELYNIEDIQDENKKIKIGFRESDYEESSLKVKEIIGDEYFDLVERAKSVHDMGLLSNIIGNSKYLCEARVEAYENHHKDLLKIKELLKKYDKKAYNDMFRKMTDKNYSAYVGSVNSNIAKERRSVDKRKIEDLYKYIEDTALKNIPDDNKDKIEILEKIKLGEFLKKQLTASNGVIPNQLQSRELRAILKKAENYLPFLKEKGEKNLTVSEMIIQLFEFQIPYYVGPLDKNPKKDNKANSWAKIKQGGRILPWNFEDKVDVKGSRKEFIEKMVRKCTYISDEHTLPKQSLLYEKFMVLNEINNIKIDGEKISVEAKQKIYNDLFVKGKKVSQKDIKKELISLNIMDKDSVLSGTDTVCNAYLSSIGKFTGVFKEEINKQSIVDMIEDIIFLKTVYGDEKRFVKEEIVEKYGDEIDKDKIKRILGFKFSNWGNLSKSFLELEGADVGTGEVRSIIQSLWETNFNLMELLSSRFTYMDELEKRVKKLEKPLSEWTIEDLDDMYLSSPVKRMIWQSMKIVDEIQTVIGYAPKRIFVEMTRSEGEKVRTKSRKDRLKELYNGIKEDSKQWVKELDSKDESYFRSKKMYLYYLQKGRCMYSGEVIELDKLMDDNLYDIDHIYPRSFVKDDSLDNLVLVKKEINNRKQNDPITPQIQASCQGFWKILHDQGFMSNEKYSRLTRKTQEFSDEEKLSFINRQIVETGQATKCMAQILQKSMGEDVDVVFSKARLVSEFRHKFELFKSRLINDFHHANDAYLNIVVGNSYFVKFTRNPANFIKDARKNPDNPVYKYHMDRFFERDVKSKSEVAWIGQSEGNSGTIVIVKKTMAKNSPLITKKVEEGHGSITKETIVGVKEIKFGRNKVEKADKTPKKPNLQAYRPIKTSDERLCNILRYGGRTSISISGYCLVEYVKKRKTIRSLEAIPVYLGRKDSLSEEKLLNYFRYNLNDGGKDSVSDIRLCLPFISTNSLVKIDGYLYYLGGKNDDRIQLYNAYQLKMKKEEVEYIRKIEKAVSMSKFDEIDREKNPVLTEEKNIELYNKIQDKFENTVFSKRMSLVKYNKKDLSFGDFLKNKKSKFEEIDLEKQCKVLYNIIFNLSNLKEVDLSDIGGSKSTGKCRCKKNITNYKEFKLIQQSITGLYSCEKDLMTI

SEQ ID NO: 427 - protein, 1142 aa, Facklamia hominis
MYSVGLDIGIASCGYSIINDVNGNIVELGTLLFKSRNSDNNEERRTNRGSRRLINRRRTRLDDGKKLLAEKGFKQDSKLKHVCPYELRVKGLHEKLTQGEIYKVVLHILKKRGISYLDESDENSSGIDGASYKDQVNLNLNLQKELTPGQIQLKRLKENGRIKSGVTFENGYQLNVFSVSAYANELNKILTKQSEYYSEIDQIWIDRFTKNGYRKEAGLVYRKRPYYDGPGNEKNNSIYGRWANFKEDGHPKENIFDQLIGLDSVDSTQVRASASTLTAQKYNLLNDLNNLTIIEDDRKFTTDEKVSIINYLMTQDITRFGPKELAKFYQLEVDQIRGWRIDNKGNPEIHSLKVYRDWKKIFNTSSIDLTSIQTWVVDELANVITLNTEIPSTLATLKIKIPDIDQQILNFVENNFYELKKKTSKNSWHSFSLKTLNILIPELLNTSEEQNTILERLNLKFDLKNKYAEKNQIPVKELLEQIYNPTVTKSVHQSIKLFNEIIEKYGKNNISYVTIEMPRDKNDQDQKDTIKRINKLNSERKNDSEKYFLERSGWDTIRFESALKKPRFAEKLLFYYEQKGKCAYSGQDILAESLLNESCEVDHIIPLSISFDDSIHNKVLVTASSNQEKGQRTPYMAFIDGAKLGQSWDDFVAWVNSCGFHRKKVQNLLYEENIFNPDVQRGFVSRNLNDTRYASRIVLNAIQSFFYKQKDLTKVKVVNGSFTHTLRKKWGSSLDKNRDTYHHHAVDATLCAVTPFINIVKYEFFEEDGIKYMVDLTTGEKVAYSDYKKMKFYDKRAYVPIWDGFIKQLTPANLYPKIKFSHQVDSKWNRKISDATIYSTRKIVETKINKKGVAKETVKDIVIDKIKDIYTPEGWRKFKEKQDKLLMKNFDEKTYNKLIKIAKEYPEKKEVQTSNGKVSLVEVSPFKMYCEEQNVPAIRKYSKKGNGPYIRSLKFYDKELGKHINITKDSYGNDIERTIRNKKIILKNQNSWRTDVYYNSVNNCYELLGIKYCHLKFYRGKYGIPKSIYDELKKEDEISSESVFKFSLYRHDRVRFEKDGEYIEALFGSKNESNKNYLELSPIDKNKWLSKENVKFFGEVAASGRFIKGLKPGIKVIKQSTDYMGHVYAIHQEKLKFVLSDA

SEQ ID NO: 428 - protein, 1347 aa, Finegoldia magna
MKSEKKYYIGLDVGTNSVGWAVTDEFYNILRAKGKDLWGVRLFEKAKTAADTRTFRSGRRRNDRKGMRLQILREIFEDEIKKVDKDFYDRLDESKFWAEDKKVSGKYSLFNDKNFSDKQYFEKFPTIFHLRKYLMEEHGKVDIRYYFLAINQMMKRRGHFLIDGQISHVTDDKPLKEQLILLINDLLKIELEEELMDSIFEILADVNEKRTDKKNNLKELIKGQDFNKQEGNILNSIFESIVTGKAKIKNIISDEDILEKIKEDNKEDFVLTGDSYEENLQYFEEVLQENITLFNTLKSTYDFVILQSILKGKSTLSDAQVERYDEHKKDLEILKKVIKKYDEDGKLFKQVFKEDNGNGYVSYIGYYLNKNKKITAKKKISNIEFTKYVKGILEKQCDCEDEAVKYLLGKIEQENFLLKQISSINSVIPHQIHLFELDKILENLAKNYPSFNNKKEEFTKIEKIRKTFTFRIPYYVGPLNDYHKNNGGNAWIFRNKGEKIRPWNFEKIVDLHKSEEEFIKRMLNQCTYLPEETVLPKSSILYSEYMVLNELNNLRIKGKPLDTDVKLKLIEELFKKKTKVTLKSIRDYMIRNNFADKEDFDNSEKNLEIVSNMKSYIDFNNILGDKFELEMVEDLIEKITIHTGNKTLLKKYIEETYPDLSSSQIQKIINLKYKDWGRLSRKLLDGIKGRNKTDDVNTVINFMRNSSDNLMQIIEGKNYSFNEYIDNLRKKYIPQEISYEVVENLYVSPSVKKMIWQVIRVTEEITKVMGYDPDKIFIEMAKSEEEKKTTISRKNKLLDLYKAIKKDERDSQYEKLLTGLNKLDESELRSKKLYLYYTQMGRDMYTGEKIDLDKLFDSTHYDKDHIIPQSMKKDDSIINNLVLVNKNANQTTKGNIYPVPSSIRNNPDIYNYWKYLMEKEFISKEKYNRLIRNTPLTNEELGVFINRQLVETRQSTKAIKELFEKFYQKSKIIPVKASLASDLRKDMNTLKSREVNDLHHAHDAFLNIVAGDVWNREFTSNPINYVNENREGDKVKYSLSKYFTRPRKSKGKVIWTPEKGRKLIVDTLNKPSVLISNESHVKKGELFNATISGKKDYKKGKIYLPLKKDDRLKDVSKYGGYKAINGAFFFLVEHTKSKKRIRSIELFPLHLLSKFYEDKNTVLDYAINVLQLQDPKIIIDKINYRTEIIIDNFSYLISTKSNDGSITVKPNEQMYWRVDEISNLKKIENKYKKDAILTEEDRKIMESYIDKIYQQFKAGKYKNRRTTDTIIEKYEIIDLDTLDNKQLYQLLVAFISLSYKTSNNAVDFTVIGLGTECGKPRITNLPDNTYLVYKSITGIYEKRIRIK

SEQ ID NO: 429 - protein, 1348 aa, Finegoldia magna; identical to SEQ ID NO: 227

SEQ ID NO: 430 - protein, 1516 aa, Flavobacteriaceae bacterium
MLKQQKDKIIGMNKKILGLDLGTNSIGWALVKQDLENKYGEIIGCGSRIIPMSQDVLGKFDAGISISQTAERTNYRSVRKLIQRNTLRRERLHRVLHQLDFLPKHYNDSIDFEKKLGQFKTDKETKLNYFVNQHGKHEFLFKDSFNEMVKEFKEEQPELFYIKNNGKETKIPYDWTIYYLRKKALSKKISKEELSWLVLNFNQKRGYYQLRGEIDEEKEKNKRYEKLYVSEVVKTNNTIKKTGEYLYDIYFDNGWKYEKQTTKPQDWLHKHKEFIITTTTLKNGETKRTFKTVDSEKDWIAIKSKTEQDIKESNKTVGAFIYDTLLKNPTQKIRGSLVKTIERKFYREEFEKILKEQIKHRPEINVNTAIGKENYTKCVTELYPRNEAHANNILTNDFNYLFTKDILFYQRPLKSKKSEIANCQYEYRTYIKKKEKTGKEERVKQPLKATPKSHPLFQEFRLWQFIHNLKIYIRETTVGNKPLFDVDITDTFFTSENDWATLFEYLNNKKEIEQKHVLEYLVSKKIISKSEKTDYRWNYVEDKKYPGNETRVDFINRLKKVENLNVDEFLTSELEFKLWHIIYSVTDKNEYEKALENFAIRQNIDKDSFVNSFKKFPPFKSDYGAYSTKAIKKLLPLMRLGKFWDGSEIPKVVVEKITDIKTRLTSVNYDESLFKKDEKKILETIVDDITPKQLLKSFVKLKGKNHLAGLNTYQACYLVYERHSESSDITQWENPDDIDSFLNHFKQHSLRNPIVEQVVTETLRTVRDIWKYYGNGSPNYFNEIHIELGREMKNPADKRKQMSAKINENENTNQRIKGILQELMNDGVQDIKPYSPSQQEILKIYEEGISQNPNVDYSKVSEDEITKIKKSNNPTLKEIQRYKLWLEQKYISPYTGKPIPLSELFTPAYQIEHIIPQSRYFDNSLSNKIICESEVNEDKSNKTAYEYLKTNGGSIVHGHHLLSLKEYEDHCQHYFKKNRTKLKNLLSEEIPEGFINRQLNDSRYISKLIKGLLSNIVREENEQEATSKNIVPVTGSITSKLKQDWGLNDKWNEIIAPRFKRLNKMTNSNDFGYFDEKINTFRIQVPDAISRGFNKKRIDHRHHTLDALVIACCTKKHIQYLNSLNNEIIKHELKPSILIKNAQGDYTKHFMLPWNNFPIDCKNAIENTIVSFKQNLRVINKTSNKYQSYKDENGNLRLGKDGKPKKGLTKQTKGNNWAVRKAMHEDTFYGEIVDGENKGKLKIKTLLDTSFDVKKIEDKVLDKSIRTILINYLKQDKYKNLSKPHEEAFSPNGIIEMNKNIISLNNNIPHKPIKRVTLKHEKGKKFSIKTLLDKKTKFAKSATGTNVFFCIYKNINGKIKYHTPSFEEIIEIQKQEFEIKYKSKLNVPETLFDKKESFELLFYLQPNDLVYLPNDEELKNRQLIDFNNLNKKQIKRIYKFTDGSGTTANFIPYQVAKVIFNLNKKEQAKSSFKYPIQNEFGVGSPQSKNQKSIEGILIKERCIKLKIDRLGNISKA

SEQ ID NO: 431 - protein, 1629 aa, Francisella cf.
MNFKILPIAIDLGVKNTGVFSAFYQKGTSLERLDNKNGKVYELSKDSYTLLMNNRTARRHQRRGIDRKQLVKRLFKLIWTEQLNLEWDKDTQQAISFLFNRRGFSFITDGYSPEYLNIVPEQVKAILMDIFDDYNGEDDLDSYLKLATEQESKISEIYNKLMQKILEFKLRKLCTDIKDDKVSTKTLKEITSYEFELLADYLANYSEILKTQKFSYTDKQGNLKELSYYHHDKYNIQEFLKRHATINIQILDTLLTDDLDIWNFNFEKFDFDKNEEKLQNQEDKDHIQAHLHHFVFAVNKIKSEMASGGRHRSQYFQEITNVLDENNHQEGYLKNFCENLHNKKYSNLSVKNLVNLIGNLSNLELKPLRKYFNDKIHAKADHWDEQKFTETYCHWILGEWRVGVKDQDKKDGAKYSYKDLCNELKQKVTKAGLVDFLLELDPCRTIPPYLDNNNRKPPKCQSLILNPKFLDNQYPNWQQYLQELKKLQSIQNYLESFETDLKVLKSSKDQPYFVEYRSSNQQIASGQRDYKDLDARILQFIFDRVKASDELLLNEIYFQAKKLKQKASSELEKLESSKKLDEVIANSQLSQILKSQHTNGIFEQGTFLHLVCKYYKQRQRARDSRLYIMPEYRYDKKLHKYNNTGRFDDDNQLLTYCNHKPRQKRYQLLNDLAGVLQVSPNFLKDKIGSDDDLFISKWLVEHIRGFKKACEDSLKIQKDNRGLLNHKINIARNTKGKCEKEIFNLICKIEGSEDKKGNYKHGLAYELGVLLFGEPNEASKPEFDRKIKKFNSIYSFAQIQQIAFAERKGNANTCAVCSADNAHRMQQIKITEPVEDNKDKIILSAKAQRLPAITTRIVDGAVKKMATILAKNIVDDNWQNIKQVLSAKHQLHIPIITESNAFEFEPALADVKGKSLKDRRKKALERISPENIFKDKNNRIKEFAKGISAYSGANLTDGDFDGAKEELDHIIPRSHKKYGTLNDEANLICVTRGDNKNKGNRIFCLRDLANNYKLKQFETTDDLEIEKKIADTIWDANKKDFKFGNYRSFINLTPQEQKAFRHALFLADENPIKQAVIRAINNRNRTFVNGTQRYFAEVLANNIYLRAKKENLNTDKISFDYFGIPTIGNGRGIAEIRQLYEKVDSDIQAYAKGDKPQASYSHLIDAMLAFCIAADEHRNDGSIGLEIDKNYSLYPLDKNTGEVFTKDIFSQIKITDNEFSDKKLVRKKATEGFNTHRQMTRDGIYAENYLPILIHKELDEVRKGYTWKNSEEIKIFKGKKYDIQQLNNLLYCLKFVDKPISIDIQISTLEELRNILTTNNIAATAEYYYINLKTQKLHEYYIENYNTALGYKKYTKEMEFLRSLAYRSERVKIKSIDDVKQVLDKDSNFIIGKITLPFKKEWQRLYREWQNITIKDDYEFLKSFFNVKSITKLHKKVRKDFSLPISTNEGKFLVKRKTWDNNFIYQILNDSDSRVDGTKPFIPAFDISKNEIVEAIIDSFTSKNIFWLPKNIELQKVDNKNIFAIDTSKWFEVETPSDLRDIGVATIQYKIDNNSRPKVRVKLDYVIDDDSKINYFTNHSLLKSRYPDKVLEILKQSTIIEFESSGFNKTIKEMLGMTLAGIYNETSNN

SEQ ID NO: 432 - protein, 1646 aa, Francisella cf.
MNIKILPIAIDLGAKNTGVFSAFYQKGTSLESLDNKNGKVYELSKDSYTLLMNNRTARRHQRRGIDRKQLVKRLFKLIWTKQLNLEWNKDTQQTISFLLNRRGFSFITDGYSPEYLNIAPEAVKAILMSILDDYNGEDDLDSYLQSATENDSKIDELYNKLLQKALEFKLRKLCIDIKEDKVTTKTLKELSNTEFKLLANYLVDYDRILRTQKFSYTDKQGNLRELNYYHHDKYNIQEFLKRNIIINDVILEKLTDDLDIWNLNFDKFDFEKNLEKLENQEDKDYLQTHLHHFVFAVNKIKSEMASGGRHRSQYFQEITNVLVENNHQEGYLKNFCENLHNKKYSNLSVKNLVNLIGNLSNLELKPLRKYFNDKIHAKADYWDEQKFAETYSDWILGEWRVGAKDKDKKDGAKYSYKNLCDELKQKVGINQDGIINQTKSDFVDFLLELDPCRTIPPYLDNNNRKPPKCQSLILNPKFLDNKYPNWQQYLQELKKLQTVQNYLGNFEIDLKDLKSSKEQPYFVKYKSLNQQIASGQRDYKDLDARVLQFIFDRVKASDELLLNEIYSHAKKLKQNTSSELEKLELCKKLDEVIANSQLSQILKSQHVNGIFEQGTFLHLVCKYYKQRQRARDSRLYIMPEYRYDKKLDKYNNTGRFDDDNQLLTYCNHKPRQKRYQLLNDLAGVLQVSPNFLKDKIGSDDDLFISKWLVEHIRGFKKACEDSLKIQKDNRGLLNHKINIARNTKGKCEKEIFNLICKIEGSEDKKGNYKHGLAYELGVLLFGEPNQASKLEFDRKIKKFNSIYSFAQIQQIAFAERKGNANTCAVCSADNAHRMQQIKVAKPVEGNKDNIILSAKAQRLPAIPTRIVDGAVKKIATILARNIVDDNWDNIKQALSNNQQLHVPIITESNAFEFEPALADIKGKSLKDKRKKALERIDPENVFKDKNNRIKEFAKGISAYSDANLANGDFDGAKEELDHIIPRSHKKYGTLNDEANLICVTREDNQNRGNKAVFLYDLKPNYKLKQFNTTDDLEIEKKIADTIWDASKQDFKFGNYRSFINLTPQEQIAFRHALFLADKNPIKKAVIRAIDNRNRTFVNGTQRYFAEVLANNIYLRAKKENLATNRITFDYFGIETTNSNGRGIADVRKLYEKVDSDIQAYAKGDKPQDSYSHLIDAMIAFCVAADEHKNEGSIGLKMGNQYGLFPTPDKYDENTGEIISWHNDDIFRKIKVSDNQFSDKKLVRKKATEGFNTHRQMTRDGIYGESYLPILIHKNLNEVRKGYNWENSEEIKIFKGKKYDIQQLNNLVYCLKFVDKPISIDIQITTLEELRNILETNNISTTAEYYYINLKTQKLHEYYIENYNTALGYKKYTKEMEFLRSLAYRTERVKIKSIDDVSMILAKDSNFKAGKIELPFKTEWQRLYLEWQNTTIKDNHEFLKSYFSVKNATKQHKKVRKDFSLPISTNEGKLLVKRKTWDNNFIYQILNDSDSRADGTKPFIPAFDISKNEIVETIIKSFTSKNIFWLPKNIELQKVDNKSIFAIDTSRWFEVETPKDLIEIGVSTIQYKIDNNSRPKVRVKLDYVMDDDSKINYFMNHSLLKSRYPDKVLEILKQSTIIEFESSGFNKTIKEMLGMTLAGIYNETSNN

SEQ ID NO: 433 - protein, 1629 aa, Francisella novicida
MNFKILPIAIDLGVKNTGVFSAFYQKGTSLERLDNKNGKVYELSKDSYTLLMNNRTARRHQRRGIDRKQLVKKLFKLIWTEQLNLEWDKDTQQAISFLFNRRGFSFITDGYSPEYLNIVPEQVKAILMDIFDDYNGEDDLDSYLKLATEQESKISEIYNKLMQKILEFKLRKLCTDIKDDKVSTKTLKEITSYEFELLADYLANYSESLKTQKFSYTDKQGNLKELSYYHHDKYNIQEFLKRHATINDEILDTLLTDDLDIWNFNFEKFDFDKNEEKLQNQEDKDHTQAHLHHFVFAVNKIKSEMASGGRHRGQYFQEITNVLDENNHQEGYLKNFCENLHNKKYSNLSVKNLVNLIGNLSNLELKPLRKYFNDKIHAKADHWDEQKFTETYCHWILGEWRVGLKDQDKKEGAKYSYKDLCNELKQKVTNAGLIDFLLELDPCRTIPPYLDNNNRKPPKCQSLILNPKFLDNQYPNWQQYLQELKKLQIIQDYLESFETDLKVLKSSKDQPYFVEYKSSNQQIASGQRDYKDLDARILQFIFDRVKASDELLLNEIYFQAKKLKQKASSELEKLESSKKLDEVIANSQLSKILKSQHTNGIFEQGTFLHLVCKYYKQRQRARDSRLYIMPEYRYDKKLDKYNNTGRFDDDNQLLTYCNHKPRQKRYQLLNDLAGVLQVSPNFLKDKIGSDDDLFISKWLVEHIRGFKKACEDSLKIQKDNRGLLNHKINIARNTKGKCEKEIFNLICKIEGSEDKKGNYKHGLAYELGVLLFGEPNEASKPEFDRKIKKFNSIYSFAQIQQIAFAERKGNANTCAVCSADNAHRMQQIKITEPVEDNKDKIILSAKAQRLPAIPTRIVDGAVKKMATILAKNIVDDNWQNIKQVLSAKHQLHIPIITESNAFEFEPALADVKGKSLKDRRKKALERISPENIFKDKNNRIKEFAKGISAYSGANLTDGDFDGAKEELDHIIPRSHKKYGTLNDEANLICVTRDDNKNKGNRIFCLHDLANNYKLKQFETTDDLEIEKKIADTIWDASKKDFKFGNYRSFINLTPQEQKAFRHALFLADENPIKQAVIRAINNRNRTFVNGTQRYFAEVLANNIYLRAKKENLNTDKISFDYFGIPTIGNGRGIAEIRQLYEKVDSDIQVYAKGDKPQASYSHLIDAMLAFCIAADEHRNDGSIGLEIDKNYSLYPLDKNTGEVFTKDIFSQIKITDNEFSDKKLVRKKATEGFNTHRQMTRDGIYAENYLPILIHKELDEVRKGYTWKNSEEIKIFKGKKYDIQQLNNLLYCLKFVDKPISIDIQISTLEELRNILTTNNIAATAEYYYINLKTQKLHEYYIENYNTALGYKKYTKEMEFLRSLAYRSERVKIKSIDDVKQVLDKDSNFIIGKITLPFKKEWQRLYREWQNTTIKDDYEFLKSFFNVKSITKLHKKVRKDFSLPISTNEGKFLVKRKTWDNNFIYQILNDSDSRVDGTKPFIPAFDISKNEIVEAIIDSFTSKNIFWLPKNIELQKVDNKNIFAIDTSKWFEVETPSDLRDIGVATIQYKIDNNSRPKVRVKLDYVIDDDSKINYFTNHSLLKSRYPDKVLEILKQSTIIEFESSGFNKTIKEMLGMTLAGIYNETSNN

SEQ ID NO: 434 - protein, 1629 aa, Francisella novicida
MNFKILPIAIDLGVKNTGVFSAFYQKGTSLERLDNKNGKVYELSKDSYTLLMNNRTARRHQRRGIDRKQLVKRLFKLIWTEQLNLEWDKDTQQAISFLFNRRGFSFITDGYSPEYLNIVPEQVKAILMDIFDDYNGEDDLDSYLKLATEQESKISEIYNKLMQKILEFKLMKLCTDIKDDKVSTKTLKEITSYEFELLADYLANYSESLKTQKFSYTDKQGNLKELSYYHHDKYNIQEFLKRHATINDRILDTLLTDDLDIWNFNFEKFDFDKNEEKLQNQEDKDHIQAHLHHFVFAVNKIKSEMASGGRHRSQYFQEITNVLDENNHQEGYLKNFCENLHNKKYSNLSVKNLVNLIGNLSNLELKPLRKYFNDKIHAKADHWDEQKFTETYCHWILGEWRVGVKDQDKKDGAKYSYKDLCNELKQKVTKAGLVDFLLELDPCRTIPPYLDNNNRKPPKCQSLILNPKFLDNQYPNWQQYLQELKKLQSIQNYLDSFETDLKVLKSSKDQPYFVEYKSSNQQIASGQRDYKDLDARILQFIFDRVKASDELLLNEIYFQAKKLKQKASSELEKLESSKKLDEVIANSQLSQILKSQHTNGIFEQGTFLHLVCKYYKQRQRARDSRLYIMPEYRYDKKLHKYNNTGRFDDDNQLLTYCNHKPRQKRYQLLNDLAGVLQVSPNFLKDKIGSDDDLFISKWLVEHIRGFKKACEDSLKIQKDNRGLLNHKINIARNTKGKCEKEIFNLICKIEGSEDKKGNYKHGLAYELGVLLFGEPNEASKPEFDRKIKKFNSIYSFAQIQQIAFAERKGNANTCAVCSADNAHRMQQIKITEPVEDNKDKIILSAKAQRLPAIPTRIVDGAVKKMATILAKNIVDDNWQNIKQVLSAKHQLHIPIITESNAFEFEPALADVKGKSLKDRRKKALERISPENIFKDKNNRIKEFAKGISAYSGANLTDGDFDGAKEELDHIIPRSHKKYGTLNDEANLICVTRGDNKNKGNRIFCLRDLADNYKLKQFETTDDLEIEKKIADTIWDANKKDFKFGNYRSFINLTPQEQKAFRHALFLADENPIKQAVIRAINNRNRTFVNGTQRYFAEVLANNIYLRAKKENLNTDKISFDYFGIPTIGNGRGIAEIRQLYEKVDSDIQAYAKGDKPQASYSHLIDAMLAFCIAADEHRNDGSIGLEIDKNYSLYPLDKNTGEVFTKDIFSQIKITDNEFSDKKLVRKKAIEGFNTHRQMTRDGIYAENYLPILIHKELNEVRKGYTWKNSEEIKIFKGKKYDIQQLNNLVYCLKFVDKPISIDIQISTLEELRNILTTNNIAATAEYYYINLKTQKLHEYYIENYNTALGYKKYSKEMEFLRSLAYRSERVKIKSIDDVKQVLDKDSNFIIGKITLPFKKEWQRLYREWQNTTIKDDYEFLKSFFNVKSITKLHKKVRKDFSLPISTNEGKFLVKRKTWDNNFIYQILNDSDSRVDGTKPFIPAFDISKNEIVEAIIDSFTSKNIFWLPKNIELQKVDNKNIFAIDTSKWFEVETPSDLRDIGVATIQYKIDNNSRPKVRVKLDYVIDDDSKINYFTNHSLLKSRYPDKVLEILKQSTTIEFESSGFNKTIKEMLGMTLAGIYNETSNN

SEQ ID NO: 435 - protein, 244 aa, Francisella tularensis
ARKQNSEIYNKLMQKILEFKLRKLCTDIKDDKVSTKTLKEITSYEFELLADYLANYSESLKTQKFSYTDKQGNLKELSYYHHDKYNIQEFLKRHATINDEILDTLLTDDFDIWNFNFEKFDFDKNEEKLQNQEDKDHTQAYLHHFVFAVNKIKSEMASGGRHRSQYFQEITNVLDENNHQEGYLKNFCENLHNKKYSNLSVKNLVNLVGNLSNLELKPLRKYFNDKNLIIGMSKSLQKLIATGY

SEQ ID NO: 436 - protein, 501 aa, Francisella tularensis
MEIEKKIADTIWDASKQDFKFGNYRSFINLTPQEQKAFRYALFLADENSIKQAVIRAINNRNRTFVNGTQRYFAEVLANNIYLRAKKENLNTDKISFDYFGIPTIGNGRGIADIRQLYEKVDSDIQAYAKGDKPQASYSHLIDAMIAFCVAADEHRNDGSIGLEIDKNYSLYLLDKNTGEVFTKDIFSQIKITDNEFSDKKLVRKKATEGFNTHRQMTRDGIYAENYLPILIHKELDEVRKGYTWGNSEELKIHKGKKYNIQQLNNIVYCLKFIDKSISIDIQISTLEELRNILTTNNIAATAEYYYINLKNQKLHEYYIENYNTALDYKKYSKEMEFLRSLAYRSERVKIKSIDDVKQVLDKDSNFIIGKITLPFKKEWQRLYLEWQNTTIKDDYEFLKSFFNVKSITKLHKKVRKDFSLPISTNEGKFLVKRKTWDNNFIYQILNDSDSRVDGTKPFIPAFDISKNEIVEAIIDSFTSKNIFWLPKNIELQNVDKIFLL

SEQ ID NO: 437 - protein, 158 aa, Francisella tularensis
MIDFLLELDPCITIPPYLDNNNRKPPKCQSLILNPKFLDNQYPNWQQYLQELKKLQSIQDYLDSFETDLKDLKSSKDQPYFVEYKSSNQQMASGQRDYKDLDARILQFIFDRVKASDELLLNEIYFQAKKLKQKASSELEKLESSKKLDEVIANSQLS

SEQ ID NO: 438 - protein, 878 aa, Francisella tularensis
MLNDLAGVLQVSRNQLLSSVEEWFQQAQRVGEISKSQDEQIFEWLKSFKIASYCKAAVEMQKQYRGTLKNAIQTAIFRQSENINKNKNKNKNTGNQQQALSENSKDVKSLTADEKKLLKLIENIAKASQKIGESLGLNDKQIKKFNSIYNFAQIQQIAFAERKGNANTCAVYSADNAHRMQQIKITELVEDNKDNIILSAKAQRLPAIPTRIVDGAVKKMATILAKNIVDDNWQNIKQVLSAKHQLHIPIITESNAFEFEPALADVKGKSLKDRRKKALERISPENIFKDKNNRIKEFAKGISAYSGANLTDGDFDGAKEELDHIIPRSYKKYGTLNDEVNLICVTRDDNKNKGKRIFCLNDLANNYKLKQFETTDDLEIEKKIADTIWDASKQDFKFGNYRSFINLIPQEQKAFRYALFLADENSIKQAVIRAINNRNRTFVNGTQRYFAEVLANNIYLRAKKENLNTDKISFDYFGIPTIGNGRGIADIRQLYEKVDSDIQAYAKGDKPQASYSHLIDAMIAFCVAADEHRNDGSIGLEIDKNYSLYPLDKNTGEVFTKDIFSQIKITDNEFSDKKLVRKKATEGFNTHRQMTRDGIYAENYLPILIHKELDEVRKGYTWGNSEELKIHKGKKYNIQQLNNIVYCLKFIDKSISIDIQISTLEELRNILTTNNIAATAEYYYINLKNQKLHEYYIENYNTALDYKKYSKEMEFLRSLAYRSERVKIKSIDDVKQVLDKDSNFIIGKITLPFKKEWQRLYLEWQNTTIKDDYEFLKSFFNVKSINKLHKKVRKDFSLPISTNEGKFLVKRKTWDNNFIYQILNDSDSRVDGTKPFIPAFDISKNEIVEAIIDSFTSKNIFWLPKNIELQKVDKIFLL

SEQ ID NO: 439 - protein, 292 aa, Francisella tularensis
MLNDLAGVLQVSRNQLLSSVEEWFQQAQRVGEISKSQDEQIFEWLKSFKIASYCKAAVEMQKQYRGTLKNAIQTAIFRQSENINKNKNKNTGNQQQALSENSKDVKSLTADEKKLLKLIENIAKASQKIGESLGLNDKQIKKFNSIYNFAQIQQIAFAERKGNANTCAVYSADNAHRMQQIKITELVEDNKDNIILSAKAQRLPAIPTRIVDGAVKKMVTILAKNIVDDNWQNIKQVLSAKHQLHIPIITESNAFEFEPALADVKGKSLKDRRKKALERISPENIFKDKNIC

SEQ ID NO: 440 - protein, 53 aa, Francisella tularensis
MNHSLLKSRYPDKVLEILKQSTIIEFESSGFNKTIKEMLGMTLAGIYNETSNN

SEQ ID NO: 441 - protein, 393 aa, Francisella tularensis
MNVKILPIAIDLDVKNTGVFSAFYQKGTSLEKLDNKNGKVYELSKDSYTLLMNNRTAQRHQRRGIDRKQLVKRLFKLVWTEQLNLEWDKDTQQAISFLFNRRGFSFITDGYSTEYLNIVPEQVKAILMDIFDDYNGEDDLDSYLKLATEQESKISEIYNKLMQKILEFKLRKLCTDIKDDKVSTKTLKEITSYEFELLADYLANYSESLKTQKFSYTDKQGNLKELSYYHHDKYNIQEFLKRHATINDEILDTLLTDDFDIWNFNFEKFDFDKNEEKLQNQEDKDHTQAYLHHFVFAVNKIKSEMASGGRHRSQYFQEITNVLDENNHQEGYLKNFCENLHNKKYSNLSVKNLVNLVGNLSNLELKPLRKYFNDKNLIIGMSKSLQKLIATGY

SEQ ID NO: 442 - protein, 1629 aa, Francisella tularensis
MNVKILPIAIDLGVKNTGVFSAFYQKGTSLERLDNKNGKVYELSKDSYTLLMNNRTARRHQRRGIDRKQLVKRLFKLIWTEQLNLEWDKDTQQAISFLFNRRGFSFITDGYSPEYLNIVPEQVKAILMDIFDDYNGEDDLDSYLKLATEQESKISEIYNKLMQKILEFKLRKLCTDIKDDKVSTKTLKEITSYEFELLADYLANYSEILKTQKFSYTDKQGNLKELSYYHHDKYNIQEFLKRHATINDEILDTLLTDDLDIWNFNFEKFDFDKNEEKLQNQEDKDHTQAHLHHFVFAVNKIKSEMASGGRHRGQYFQEITNVLDENNHQEGYLKNFCENLHNKKYSNLSVKNLVNLIGNLSNLELKPLRKYFNDKIHAKADHWDEQKFTETYCHWILGEWRVGVKDQDKKDGAKYSYKDLCNELKQKVTKAGLVDFLLELDPCRTIPPYLDNNNRKPPKCQSLILNPKFLDNQYPNWQQYLQELKKLQSIQNYLESFETDLKVLKSSKDQPYFVEYKSSNQQIASGQRDYKDLDARILQFIFDRVKASDELLLNEIYFQAKKLKQKASSELEKLESSKKLDEVIANSQLSQILKSQHTNGIFEQGTFLHLVCKYYKQRQRARDSRLYIMPEYRYDKKLDKYNNTGRFDDDNQLLTYCNHKPRQKRYQLLNDLAGVLQVSPNFLKDKIGSDDDLFISKWLVEHIRGFKKACEDSLKIQKDNRGLLNHKINIARNTKGKCEKEIFNLICKIEGSEDKKGNYKHGLAYELGVLLFGEPNEASKPEFDRKIKKFNSIYSFAQIQQIAFAERKGNANTCAVCSADNAHRMQQIKITEPVEDNKDKIILSAKAQRLPAIPTRIVDGAVKKMATILAKNIVDDNWQNIKQVLSAKHQLHIPIITESNAFEFEPALADVKGKSIKDRRKKALERISPENIFKDKNNRIKEFAKGISAYSGDNLASGDFDGAKEELDHIIPRSHKKYGTLNDEANLICVTRDDNKNKGNRIFCLHDLANNYKLKQFETTDDLEIEKKIADTIWDASKKDFKFGNYRSFINLTPQEQKAFRHALFLADENPIKQAVIRAINNRNRTFVNGTQRYFAEVLANNIYLRAKKENLNTDKISFDYFGIPTIGNGRGIVEIRQLYEKVDSDIQAYAKGDKPQASYSHLIDAMLAFCIAADEHRNDGSIGLEIDKNYSLYPLDKNTGEVFTKDIFSQIKITNNEFSDKKLVRKKATEGFNTHRQMTRDGIYAENYLPILIHKELDEVRKGYTWGNSEELKIHKGKKYDIQQLNNLVYCLKFIDKSISIDIQISTLEELRNILTTNNIATTAEYYYINLKTQKLHEYYIENYNTALGYKKYTKEMEFLRSLAYRSERVKIKSIDDVKQVLDKDSNFIIGKITLPFKKEWQRLYREWQNTTIKDDYEFLKSFFNVKSITKLHKKVRKDFSLPISTNEGKFLVKRKTWDNNFIYQILNDSDSRVDGTKPFIPAFDISKNEIVEAIIDSFTSKNIFWLPKNIELQKVDNKNIFAIDTSKWFEVETPSDLRDIGVATIQYKIDNNSRPKVRVKLDYVIDDDSKINYFTNHSLLKSRYPDKVLEILKQSTIIEFESSGFNKTIKEMLGMTLAGIYNETSNN

SEQ ID NO: 443 - protein, 285 aa, Francisella tularensis
MTRDGIYAENYLPILIHKELDEVRKGYTWGNSEELKIHKGKKYNIQQLNNIVYCLKFIDKSISIDIQISTLEELRNILTTNNIAATAEYYYINLKNQKLHEYYIENYNTALDYKKYSKEMEFLRSLAYRSERVKIKSIDDVKQVLDKDSNFIIGKITLPFKKEWQRLYLEWQNTTIKDDYEFLKSFFNVKSITKLHKKVRKDFSLPISTNEGKFLVKRKTWDNNFIYQILNDSDSRVDGTKPFIPAFDISKNEIVEAIIDSFTSKNIFWLPKNIELQKVDKIFLL

SEQ ID NO: 444 - protein, 1323 aa, Fructobacillus fructosus
MVYDVGLDIGTGSVGWVALDENGKLARAKGKNLVGVRLFDTAQTAADRRGFRTTRRRLSRRKWRLRLLDELFSAEINEIDSSFFQRLKYSYVHPKDEENKAHYYGGYLFPTEEETKKFHRSYPTIYHLRQELMAQPNKRFDIREIYLAIHHLVKYRGHFLSSQEKITIGSTYNPEDLANAIEVYADEKGLSWELNNPEQLTEIISGEAGYGLNKSMKADEALKLFEFDNNQDKVAIKTLLAGLTGNQIDFAKLFGKDISDKDEAKLWKLKLDDEALEEKSQTILSQLTDEEIELFHAVVQAYDGFVLIGLLNGADSVSAAMVQLYDQHREDRKLLKSLAQKAGLKHKRFSEIYEQLALATDEATIKNGISTARELVEESNLSKEVKEDTLRRLDENEFLPKQRTKANSVIPHQLHLAELQKILQNQGQYYPFLLDTFEKEDGQDNKIEELLRFRIPYYVGPLVTKKDVEHAGGDADNHWVERNEGFEKSRVTPWNFDKVFNRDKAARDFIERLTGNDTYLIGEKTLPQNSLRYQLFTVLNELNNVRVNGKKFDSKTKADLINDLFKARKTVSLSALKDYLKAQGKGDVTITGLADESKFNSSLSSYNDLKKTFDAEYLENEDNQETLEKIIEIQTVFEDSKIASRELSKLPLDDDQVKKLSQTHYTGWGRLSEKLLDSKIIDERGQKVSILDKLKSTSQNFMSIINNDKYGVQAWITEQNTGSSKLTFDEKVNELTTSPANKRGIKQSFAVLNDIKKAMKEEPRRVYLEFAREDQTSVRSVPRYNQLKEKYQSKSLSEEAKVLKKTLDGNKNKMSDDRYFLYFQQQGKDMYTGRPINFERLSQDYDIDHIIPQAFTKDDSLDNRVLVSRPENARKSDSFAYTDEVQKQDGSLWTSLLKSGFINRKKYERLTKAGKYLDGQKTGFIARQLVETRQIIKNVASLIEGEYENSKAVAIRSEITADMRLLVGIKKHREINSFHHAFDALLITAAGQYMQNRYPDRDSTNVYNEFDRYTNDYLKNLRQLSSRDEVRRLKSFGFVVGTMRKGNEDWSEENTSYLRKVMMFKNILTTKKTEKDRGPLNKETIFSPKSGKKLIPLNSKRSDTALYGGYSNVYSAYMTLVRANGKNLLIKIPISIANQIEVGNLKINDYIVNNPAIKKFEKILISKLPLGQLVNEDGNLIYLASNEYRHNAKQLWLSTTDADKIASISENSSDEELLEAYDILTSENVKNRFPFFKKDIDKLSQVRDEFLDSDKRIAVIQTILRGLQIDAAYQAPVKIISKKVSDWHKLQQSGGIKLSDNSEMIYQSATGIFETRVKISDLL

SEQ ID NO: 445 - protein, 1367 aa, Fusobacterium sp.
MKKQKFSDYYLGFDIGTNSVGWCVTDLDYNVLRFNKKDMWGSRLFDEAKTAAERRVQRNSRRRLKRRKWRLNLLEEIFSDEIMKIDSNFFRRLKESSLWLEDKNSKEKFTLFNDDNYKDYDFYKQYPTIFHLRDELIKNPEKKDIRLIYLALHSIFKSRGHFLFEGQNLKEIKNFETLYNNLISFLEDNGINKSIDKDNIKKLEKIICDSGKGLKDKEKEFKEIFNSDKQLVAIFKLSVGSSVSLNDLFDTDEYKKEEVEKEKISFREQIYEDDKPIYYSILGEKIELLDIAKSFYDFMVLNNILSDSNYISEAKVKLYEEHKKDLKNLKYIIRKYNKENYDKLFKDKNENNYPAYIGLNKEKGKKEVVEKSGLKIDDLIKVIKGYLPKPERIEEKDKTIFNEILNKIELKTILPKQRISDNGTLPYQIHEVELEKILENQSKYYDFLNYEENGVSTKDKLLKTFKFRIPYYVGPLNSYHKDKGGNSWIVRKEEGKILPWNFEQKVDIEKSAEEFIKRMTNKCTYLNGEDVIPKDSFLYSEYIILNELNKVQVNDEFLNEENKRKIIDELFKENKKVSEKKFKEYLLVNQIANRTVELKGIKDSFNSNYVSYIKFKDIFGEKLNLDIYKEISEKSILWKCLYGDDKKIFEKKIKNEYGDILNKDEIKKINSFKFNTWGRLSEKLLTGIEFINLETGECYSSVMEALRRTNYNLMELLSSKFTLQESIDNGNKEMNEVSYRDLIEESYVSPSLKRAILQTLKIYEEIKKITGRVPKKVFIEMARGGDETMKNKKIPARQEQLKKLYDSCGNDIANFSIDIKKMKSSLSSYDNNSLRQKKLYLYYLQFGKCMYTGREIDLDRLLQNNDTYDIDHIYPRSKVIKDDSFDNLVLVLKNENAEKSNEYPVKKEIQEKMKSFWRFLKEKNFISDEKYKRLTGKDDFELRGFMARQLVNVRQTTKEVGKILQQIEPEIKIVYSKAEIASSFREMFDFIKVRELNDTHHAKDAYLNIVAGNVYNTKFTEKPYRYLQEIKENYDVKKIYNYDIKNAWDKENSLEIVKKNMKKNTVNITRFIKEEKGQLFDLNPIKKGETSNEIISIKPKLYNGKEEKLNEKYGYYKSLNPAYFLYVEHKEKNKRIKSFERVNLVDVNNIKDEKSLVKYLIENKKLVEPRLIKKVYKRQVILINDYPYSIVALDSNKLMDFENLKPLFLENKYEKILKNVIKFLEDNQGKSEENYKFIYLKKKDRYEKNETLESVKDRYNLEFNEMYDKFLEKLDSKDYKNYINNKKYKNLLDVKEKFIKLNLFDKAFTLKSFLDLFNRKTMADFSKVGLTKYLGKIQKISSNVLSKNELYLLEESVTGLFVKKIKL

SEQ ID NO: 446 - protein, 1367 aa, Fusobacterium sp.
MKKQKFSDYYLGFDIGTNSVGWCVTDLDYNVLRFNKKDMWGSRLFDEAKTAAERRVQRNSRRRLKRRKWRLNLLEEIFSDEIMKIDSNFFRRLKESSLWLEDKNSKEKFTLFNDDNYKDYDFYKQYPTIFHLRDELIKNPEKKDIRLIYLALHSIFKSRGHFLFEGQNLKEIKNFETLYNNLISFLEDNGINKSIDKDNIKKLEKIICDSGKGLKDKEKEFKEIFNSDKQLVAIFKLSVGSSVSLNDLFDTDEYKKEEVEKEKISFREQIYEDDKPIYYSILGEKIELLDIAKSFYDFMVLNNILSDSNYISEAKVKLYEEHKKDLKNLKYIIRKYNKENYDKLFKDKNENNYPAYIGLNKEKGKKEVVEKSGLKIDDLIKVIKGYLPKPERIEEKDKIIFNEILNKIELKTILPKQRISDNGTLPYQIHEVELEKILENQSKYYDFLNYEENGVSTKDKLLKTFKFRIPYYVGPLNSYHKDKGGNSWIVRKEEGKILPWNFEQKVDIEKSAEEFIKRMTNKCTYLNGEDVIPKDSFLYSEYIILNELNKVQVNDEFLNEENKRKIIDELFKENKKVSEKKFKEYLLVNQIANRTVELKGIKDSFNSNYVSYIKFKDIFGEKLNLDIYKEISEKSILWKCLYGDDKKIFEKKIKNEYGDILNKDEIKKINSFKFNTWGRLSEKLLTGIEFINLETGECYSSVMEALRRTNYNLMELLSSKFTLQESIDNGNKEMNEVSYRDLIEESYVSPSLKRAILQTLKIYEEIKKITGRVPKKVFIEMARGGDETMKNKKIPARQEQLKKLYDSCGNDIANFSIDIKKMKSSLSSYDNNSLRQKKLYLYYLQFGKCMYTGREIDLDRLLQNNDTYDIDHIYPRSKVIKDDSFDNLVLVLKNENAEKSNEYPVKKEIQEKMKSFWRFLKEKNFISDEKYKRLTGKDDFELRGFMARQLVNVRQTTKEVGKILQQIEPEIKIVYSKAEIASSFREMFDFIKVRELNDTHHAKDAYLNIVAGNVYNTKFTEKPYRYLQEIKENYDVKKIYNYDIKNAWDKENSLEIVKKNMKKNTVNITRFIKEEKGQLFDLNPIKKGETSNEIISIKPKLYNGKEEKLNEKYGYYKSLNPAYFLYVEHKEKNKRIKSFERVNLVDVNNIKDEKSLVKYLIENKKLVEPRLIKKVYKRQVILINDYPYSIVALDSNKLMDFENLKPLFLENKYEKILKNVIKFLEDNQGKSEENYKFIYLKKKDRYEKNETLESVKDRYNLEFNEMYDKFLEKLDSKDYKNYINNKKYKNLLDVKEKFIKLNLFDKAFTLKSFLDLFNRKTMADFSKVGLTKYLGKIQKISSNVLSKNELYLLEESVTGLFVKKIKL

SEQ ID NO: 447 - protein, 1367 aa, Fusobacterium sp.
MKKQQFSDYYLGFDIGTNSVGWCVTDFNYNVLRFNKKDMWGSRLFDEAKTAAERRVQRNSRRRLKRRKWRLNLLEEIFSDEILKIDSNFFRRLKESSLWLEDKSSKEKFTLFNDDNYKDYDFYKQYPTIFHLRNELIKNPEKKDIRLVYLALHSIFKSRGHFLFEGQNLKDIKNFETLYNNLMAFLEDNDIYKNIDSSYIGNLENIICDSKKGLKDKEKEFKEIFNSDKQLVGFFKLSVGSSVSLNDLFDTDEYKKGEVEKEKISFREQIYEDDKPIYYSILGEKIEFLDIAKSFYDFMVLNNILADSQYISEAKVKLYDEHKRDLKNLKYIIRKYNKENYDKLFKDKNESNYSAYIGLNKEKGKKEVIEKSRLKIDDFAKIIKGYLPKAEKIDEKDRSIFNEILDKIELKTILPKQRISDNGTLPYQIHEAELEKILENQAKYYDFLNHEENGISTKDKLLMTFKFRIPYYVGPLNSYHKNKGGNSWIVRKEEGKILPWNFEQKVDIEKSAEEFIKRMTNKCTYLNGEDVIPKDSFLYSEYIILNELNKVQVNDEFLNKEIKKKIIEDLFKKSKKISEKNFREYLLVNQITNKTVELKGVKDAFNSNYVSYIKFKDIFGDKLNLDIYKEISEKSILWKCLYGDDKKIFEKKIKSVYGDILTKDEIKKINSFKFNTWGRLSEKLLTEIEFIDLETGECYSSVMDALRRTNYNLMELLSSKFTLQENIDNENKEVSEFSYRDLVEESYVSPSLKRAILQTLKIYEEIRKITGRIPKKVFIEMARGGDETMKNKKIPARQEQLKKLYDSCGKDISNFSIDIKEMKNSLNSYDNNSLRQKKLYLYYLQFGKCMYTGKEIDLNRLLQNNDTYDIDHIYPRSKVIKDDSFDNLVLVLKNENAEKSNEYPLKKEIQEKMKSFWKFLKEKNFISDEKYKRLTGKDEFELRGFMARQLVNVRQTTKEAGKILQQIEPEIKIVYSKAEIASSFREMFDFIKVRELNDTHHAKDAYLNIVAGNVYNTKFTEKPYRYLQEIKENYDVKKIYNYDIKNAWDKEKSLEIVKKNMEKNTVNITRFIKEEKGQLFDLNPIRKGETSNEIIAIKPKFYEGSTEKLNEKYGYYKSLNPAYFIYVEHKEKNKIIRSFERVNLVDVNKIKDEKSLIKYLIENKGLIEPKVIKKVYKRQVILINNFPYSIVALDSNKLMDFENLKPLFLERKYEKILKNAIKFLEDNQGKTEEYYKFLYLKKKDRNEKNETIDSVKERYNIEFNEMYDKFLEKLDSKDYKNYINNKKYSELVNVKEKFIKLNLFDKAFTLKSFLDLFNRKTMADFSKVGLTKYLGKIQKISSNVLSKNELHLLEESVTGLFVKKIKL

SEQ ID NO: 448 - protein, 1391 aa, Galbibacter sp.
MKTILGLDLGTNSIGWALVKEAENENEVSDIIKLGVRVNPLTVDELTNFEGGKAYSNNAERTLKRGARRNLQRYKLRRENLIEILLKNGLINKDTALTEVGKETTHQTLKLRSKSANEKVSLEDLAKILLSINKKRGYKSSRKVNAEDDGVAIDGMEVAKLLYDENMTPGEYVLRLLESGKKHLPDFYRSDLQEEFNLVWKKQSEFYPLILTKELFFELHGKNKSQTWAICKEPLGIVGVKLKGSAKEQKFARYRLRKEALTQQIELEHLAIVLQDINNDSNKSSGYLGAISDRSKELFFNKETVGQYQYKQLQKDPNTSLKNQVFYRQDYLDEFEVIWRNQAKFYPQLTNELKQEIRDVVIFYQRKLKSQKNLISFCQFESTQQNYVEKETGKTKIRTIGRRVIPRSSPLFQEFKIWQSLNNLKFVNSESNQIIQFIELEDDVKKVVFDELNLRGDLKPNQVLKILSKYMKIGKLTQWKCNLEEIEGNRTNSALYNVFQMIAEEEGYGFNWGKKSALEIKSELKAIFSSIGINDSILDFDFSKKLDQQLSYQLWHLLYSAEEGNSKITEEDKFTYGNTGVALKKKLHLKFGFKPEYSTLISNLRFTSDYGNLSSKAISKILPFLRDGSDYSKACQYAGYNHSNSLSADELDNRELKPKLELLKKNSLRNPVVEKILNQMVNVVNQVIDNYGKPDEVRIELARELKKSAKERSQMTKNISDATRRNAEIKKYLSKEFGIPNPTKGDVIRYRLWEELASNGYKDLFRDKYIPKEKLFSNEIDIEHIIPKALLFDDSFSNKTLAFKVDNLKKADRTAFDFMSTDFSKDVDSYIGRIETLHKDGKISSSKYKKLMIPKSKLVDGFIERDLRNTQYIAKQARKMLLEVFKTVVPTTGKITDKLREDWDLINVMKELNFPKYKALGLTKKIERFDVGSEKIKSINVIEGWSKRNDHRHHAMDALAVAFTTHNHIQYLNYLNARKDIHHEMHGTIKSIENQIIGKDVMGKRRFIPPISDLRMKAKLQIESILISFKNKNKVVTWSVNKTKLKGKDNYNKRRQLTPRGQLHKETVYGKIKLIDPKPLKLNNKFTLVRASMIVDKVHREIVLQHLSKYDNNSEVAFDSKTIKIDPILIEGIGLKEVVCYEDVFKIRKKISGDNFKNEKHLEKVIDEKVKQILKDRVIKFQGNFKEAFSNLEENPIWLNKSKGIAVKSVAIKGVNNAESLHEGKDHFGDQILDKNKKQIPVDFVSTGNNHHVGIYEDKDGNLQERVVSFFEAVTRVNEGLPIIDKTYNSDIGWKFKFTMKQNEMFVFPSDDFDPNEFDLTDGKNAAKISPNLYRVQKIATKNYMFRHHLETVVTNDLEFTYKSIRSTGWLRNLVKVRINHLGEIVYVGEY

SEQ ID NO: 449 - protein, 1186 aa, Gardnerella vaginalis
MEGNISYAIGIDVGLNSVGLAAIRLDDYGEPIRILKAMSVIHDAGIDPNGAKESDTRKAISGVARRVRRLYRQRRRRLQKLDFLLQSLGWPVVENKDLDFSDSFIPWIFRAKLADEYIADEEQRKQMLSVAIRHIARHRGWRNPYQSIKSMMQETEYSEFYNELLKNIEKLAPGVGCEGSTPAQLVRDYLLSQQGKASRRLRITTGGRRKNHPHSLDPVLPRKLMQSDNMLEILNIFNVQHIDDKYVREQIINAVFYAESPRGSAENRVGKDAITGKGKRALKASLAFQKYRIISTISNLRIRENSKERCLTIEEKQNVYKLLTTSIDKSSKRKSAEAPLYTWIDVADCLGIERYKLRGVGSQIGDGESVGNRPPMLNSELAILYANNKSLGQSLITWWLASNRTQEDKEALIEILSNTVDIEAIHDNPEYQDKYGSAIAFIDSMNETEIAALENISLPDGRAAYSLETLDELNKQMLETDDDLFEARKKLFNLPNNWRPAEAPIAEPTGNPSVDRVLKIVHRFLISAKNRWGNPERINIEHVRSGFQSKKMANSYKELLDKRTEGKENLKAMMRNSLHLGTSDSISDADIRRYEAVQRQNGQCLYCGSEITYHTCELDHIVPRKGPGSTNTRENLVATCSSCNAQKCNTPFATWCEQSTYCKNHDISADSAINRVRAFIFPPNSYDKRGANQFKKEVIARLKQKVGDEAFDNRSIESVAWMANELHRRIDWYYNSQNYQTNNGISDISNKAQTNVGVYAGSLTAIARRMSGIDGKLEFFDGRRKTRFDRRHHAVDASVIAMMTPGIAQILAIKCNLRETQLLQGNKVVPGGIDWKEYPTANDQGYQQYANWSVRMNALLKLLNEEMRADRIAVVNSIRLRYSNSSVHQYEVNALLKLHVGDEIDSETIRRSSTPALYCALTRNPDYDVNNGFPENPGRTILLHNKKLNADDSITFFKAQAVQLFVREGSAKIGNSIHHLRIYEYFEKLKSGKIKKSYGMIRVFQNDLHRHIHEDLFSCDLPEQSISMRYADTKVAHAVQTGNANYLGYLVPGDEIIVDFSHITLSENIGKFVEFLNKIGADCTAYRHWVVVGTDTEKVLILKPSMISSEGIDKLYSNCERNNFDYSSYEKSINEILAGKGWRVSVNVLAQYKAATIRRNALGEVRWASRSHLPISWSWDTGENRE

SEQ ID NO: 450 - protein, 1186 aa, Gardnerella vaginalis
MEGNISYAIGIDVGLNSVGLAAIRLDNNGEPIRILKAMSVIHDAGIDPNGAKESDTRKAISGVARRVRRLYRQRRRRLQKLDFLLHSLGFPVVENKDLDFSDSFIPWIFRAKLADEYIADEKQRKQMLSVAIRHIARHRGWRNPYQSIKSMTQETEYSEFYNELLKNIEKFAPGVGCEGSTPAQLVRDYLLLQQGKASRRLRITTDEKRKNHPNSLNPILPRKLMQSDNMLEILNIFNVQHIDDKYVREQIINAVFYAKSPRGSAENRVGKDAITGKGKRALKASLAFQKYRIISTISNLRIRENSKERCLTIEEKQSVYKLLTTSTDESSKEKSAEAPLYTWIDVADCLGIERYKLRGVGSQIGDGESVGNRPPMLNSELAIIYANNKSLGKSLLTWWLDANRTQEDKEALIEILSNTVDIEAIHDNPEYQDKYGSAIAFIDSMDETEIAALENISLPDGRAAYSLETLDKLNKQMLETDDDLFEARKKLFNLPNNWRPSEAPIAEPTGNPSVDRVLKIVHRFLISAKNRWGNPERINIEHVRSGFKSKKMANSYKELLDKRTKGKENLKAMMRNSLHLGMSDSISDADIRRYEAVQRQNGQCLYCGSEITYHTCELDHIVPRKGPGSTNTRENLVATCSLCNAQKCNTPFSTWCEQSTYCKNHDISVDSAINRVRAFIFPPNSYDKRGANQFKKEVIARLKQKVGDEAFDNRSIESVAWMANELHRRIDWYYNSQNYQTNNGISDITNKAQTNVGVYAGSLTAIARRMSGIDGKLEFFDGRRKTRFDRRHHAVDASVIAMMTPGIAQILAIKCNLRETQLLQGNKVVPGGIDWKEYPTANDQGYQQYANWSVRMNALLKLLNEEMRADRIAVVNSIRLRYNNSSVHQYKVNALLKLHVGDEIDSGTIRRSSTPALYCALTRNPDYDVNNGLPENPNRAILLHDKKLNADDSITFFKAQAVQLFVREGSAEIGSSTHHLRIYEYFKKLKSGKIKKSYGMIRVFQNDLHRHIHEDLFSCDLPEQSISMRYADTEVAHAVQTGNSNYLGYLVPGDEIIVDFSHVKLSGNIGTFVEFLNKIGANCAAYNHWVVVGTDTEKVLILKPSMISSEGIDKLYSNCKRNNFDYSSYEKSINEILVGKGWRVSVNVLAKYNAETIRRNALGEVRWTSRSHLPISWSWNTGENRE

SEQ ID NO: 451 - protein, 1258 aa, Gemella haemolysans
MTEENPDIRKVFLAIHHILKNRGHFLLQGQSFKEGNLNNLIKELLNLDILHISIEITEENINKITEIALEKKTLTDKVNDLKKIYPKEKQLLEAFRLIFGGKTSLDKLFAIDEYKELDASVKSVSFKEKIYEEVRHDYEQVLSNYIELLDLAKLVYDSIILSDIKKEGKTLSESKVELYHKHREDLTKLKTLVKNDSKLSEDKKVELYSAIFKEDKDKGTNYVNYIRKSEEGKGCNYEDFKKFLVKELAKLEESSAKEEILRDLELELFLPLQRTKDNSVVPYQIHKEELVKILDNAAKYHKFLNEKDDSGYSIIEKVIQLLEFRIPYYVGPLNSSKKAKVDGFAWSVRNKGYENTPVTPWNYEKVIDESASAEKFITNLTNKCTYLKGEDVLPKSSLLYSEFALLNELNALKYDGNRISLEARNVIIEKLFKEQGKKVTKTSIKNLLKAEGYIDGKGEITGIDITVKNDLKSYRDFKKILGDKFNTEHVENIILWITLYGESRKLIKAKIEAVYGDIYSKEEIAKMSRLVYKDWGRFSRKLLTELVSKKLYNEETGECLNIIGAMRQNNILFMELLADRFDYSQQIIDYNKELQKEVTEITPEILDDLYVSPSVKRSIWQTVRIVEELKKIIGCAPAKIFVETTRSNQDKKKPTDSRKKQLELFYKAVKKDVKDLEKEIGSLNFDKLNERLSSVEPSKLKAKKLYLYYTQLGRCMYSGETIDITQLNTTAYDIDHIYPQSKVKDDSFTNTVLVKREYNAAKTDRYPLGSDIQTPSNRRFWKFLKEKGLITDEKYNRLVRTEEFSDEELTGFIARQLVETSQSVKAVAGILGELNPKTSICYSKAENVSSFRQNFGKIKEGNRKSDNTEQLIKVREINDYHHAKDAYLNVVVGNVYDTKFTRNVFNFIKDKKDGRKYSLNNVFYENVSNSNNVAWELNKTVHQVEKVMNNNNILVTRRTSEQKGGLFDATVYKAKVAAKAKEGVYYPLKTSDPVVNDVTKYGGFTKVKIAYYSIFEYTLVNKKGEEKITRIIPIPIYVSQNIKDDSTLLEFGKTQINIKSGEEVKDFKLKYRKLCIGDLVKINNFFNFIGGKTNDSFVYDGAVQVTLDTESERYIKTLSKYQNWKKENKDGELWESITKEKNTELYNLLVEKMNSGIFIKKKPNKFNELNSEEIRNNFSSISLEEQAKVLLEVLNLLTNKKSIFDLKSINITAARGKISFNLSNLSQFSIIEQSVAGFYEKEITIIGDKENDMENNNC

SEQ ID NO: 452 - protein, 1054 aa, Haemophilus parainfluenzae
MENKNLNYILGLDLGIASVGWAVVEIDEKENPLRLIDVGVRTFERAEVPKTGESLALSRRLARSARRLTQRRVARLKKAKRLLKSENILLSTDERLPHQVWQLRVEGLDHKLERQEWAAVLLHLIKHRGYLSQRKNESKSENKELGALLSGVDNNHKLLQQATYRSPAELAVKKFEVEEGHIRNQQGAYTHTFSRLDLLAEMELLFSRQQHFGNPFASEKLLENLTALLMWQKPALSGEAILKMLGKCTFEDEYKAAKNTYSAERFVWITKLNNLRIQENGLERALNDNERLALMEQPYDKNRLFYSQVRSILKLSDEAIFKGLRYSGEDKKAIETKAVLMEMKAYHQIRKVLEGNNLKAEWAELKANPTLLDEIGTAFSLYKTDEDISAYLAGKLSQPVLNALLENLSFDKFIQLSLKALYKLLPLMQQGLRYDEACREIYGDHYGKKTEENHHFLPQIPADEIRNPVVLRTLTQARKVINGVVRLYGSPARIHIETGREVGKSYKDRRELEKRQEENRKQRENAIKEFKEYFPHFAGEPKAKDILKMRLYKQQNAKCLYSGKPIELHRLLEKGYVEVDHALPFSRTWDDSFNNKVLVLANENQNKGNLTPFEWLDGKHNSERWRAFKALVETSAFPYAKKQRILSQKLDEKGFIERNLNDTRYVARFLCNFIADNMHLTGEGKRKVFASNGQITALLRSRWGLAKSREDNDRHHALDAVVVACSTVAMQQKITRFVRFEAGDVFTGERIDRETGEIIPLHFPTPWQFFKQEVEIRIFSDNPKLELENRLPDRPQANHEFVQPLFVSRMPTRKMTGQGHMETVKSAKRLNEGISVIKMPLTKLKLKDLELMVNREREKDLYDTLKARLEAFNDDPAKAFAEPFIKKGGAIVKSVRVEQIQKSGVLVREGNGVADNASMVRVDVFTKGGKYFLVPIYTWQVAKGILPNKAATQYKDEEDWEVMDNSATFKFSLHPNDLVKLVTKKKTILGYFNGLNRATGNIDIKEHDLDKSKGKQGIFEGVGIKLALSFEKYQVDELGKNIRLCKPSKRQPVR

SEQ ID NO: 453 - protein, 1052 aa, Haemophilus parainfluenzae]
MKNTSLNYVLGLDLGISSVGWAVVEIDEKENPLSLIDVGVRTFERAETQKGESLALARRLARSARRLTQRRVARLKKAKRLLKSENILLSTDECLPHQVWQLRVEGLERKLERQEWAAVLLHLIKHRGYLSQRKNESKSENKELGALLSGVANNHKLLQQTTYRTPAELAVKKFEVEEGHIRNQQGSYTHTFSRLDLLSEMELLFSRQQHFGNPFTSEKLLENLTALLMWQKPALSGDAILKMLGKCTFENEYKAAKHTYSAERFIWITKLNNLRIQENGLERALNDNERLALMKQPYEKAKLTYAQVRSILNLSDEAIFKGLRYSGEDKKTSETKTVLMEMKAYHQIRLALEKNDLKTEWAELKVNSSLLDEIGTAFSLYKTDEDISTCLAGKLSQPVLNALLENLNFDKFIQLSLKALHKILPLMQQGLRYDEACAEIYGDHYGKKTEENHLLLPQIPADEIRNPVVLRTLTQARKVINGVVRLYSSPARIHIETGREVGKSYQDRRELEKRQEENRKQREKAISEIKTLFPNFSGEPKAKDILKMRLYYQQNAKCLYSGKPLELHRLLEQGYVEIDHALPFSRTWDDSFNNKVLVLANENQNKGNLTPFEWLDGKNNSERWKAFKALVETSAFPYTKKQRILSQKLDEKGFIERNLNDTRYVARFLCNFIADNMHLTGEGKRKVFASNGQITALLRGRWGLAKSREDNDRHHALDAVVVACSTVSMQQKITRFVRFEEGNVFTGERIDRETGEIIPLHFPAPWKFFREEVEIRIFSDNPKLELENRLIARPQANHEFVQPLFVSRMPTRKMIGQGHMETIKSAKRLNEGLSVIKMLLTKLRLKDLESMVNREREKELYEALKARLEAFNDEPAKAFAEPFMKKGGAIVKSVRVEQVQKSGVLVRDGNGVADNASMVRVDVFTKGGKYFLVPIYTWQVAKGILPNKAVIQGKNEEDWEVMDDATFRFSLHQNDLVKLVTKKKTIFGYFNGLNRATGNIDIKEHDLEKSKVKDGIHQSIGIKLALSFEKYQVDELGKNIRLCKSSKRQAVR

SEQ ID NO: 454 - protein, 121 aa, Haemophilus pittmaniae
MLNRRYAAKITRFVRFEAGDVFTGERIDRETGEIIPLHFPTPWQFFKQEVEIRIFSDNPKLELENRLPDRPQANHEFVQPLFVSRMPTRKMTGQGHMETVKSAKRLNEGISVIKMPLTKLN

SEQ ID NO: 455 - protein, 203 aa, Haemophilus pittmaniae
MVNREREKDLYDALKARLEAFNDDPAKAFAEPFIKKGGAIVKSVRVEQVQKSGVLVREGNGVADNASMVRVDVFTKDGKYFLVPIYTWQVAKGILPNKAATQYKDEEDWEVMDNSAIFKFSLHPNDLVKLVTKKKTILGYFNGLDRATGNIAIKEHDLEKSKAKGGIHQGVGIKLALSFEKYQIDELGKNIRLCNPSKCQSVR

SEQ ID NO: 456 - protein, 1052 aa, Haemophilus sputorum
MKNTSLNYVLGLDLGISSVGWAVVEIDEKENPLSLIDVGVRTFERAETQKGESLALARRLARSARRLTQRRVARLKKAKRLLKSENILLSTDECLPHQVWQLRVEGLERKLERQEWAAVLLHLIKHRGYLSQRKNESKSENKELGALLSGVANNHKLLQQTTYRTPAELAVKKFEVEEGHIRNQQGSYTHTFSRLDLLSEMELLFSRQQHFGNPFTSEKLLENLTALLMWQKPALSGDAILKMLGKCTFENEYKAAKHTYSAERFIWITKLNNLRIQENGLERALNDNERLALMKQPYEKAKLTYAQVRSILNLSDEAIFKGLRYSGEDKKTSETKTVLMEMKAYHQIRLALEKNDLKTEWAELKVNSSLLDEIGTAFSLYKTDEDISTCLAGKLSQPVLNALLENLNFDKFIQLSLKALHKILPLMQQGLRYDEACAEIYGDHYGKKTEENHLLLPQIPADEIRNPVVLRTLTQARKVINGVVRLYSSPARIHIETGREVGKSYQDRRELEKRQEENRKQREKAISEIKTLFPNFSGEPKAKDILKMRLYYQQNAKCLYSGKPLELHRLLEQGYVEIDHALPFSRTWDDSFNNKVLVLANENQNKGNLTPFEWLDGKNNSERWKAFKALVETSAFPYTKKQRILSQKLDEKGFIERNLNDTRYVARFLCNFIADNMHLTGEGKRKVFASNGQITALLRGRWGLAKSREDNDRHHALDAVVVACSTVSMQQKITRFVRFEEGNVFTGERIDRETGEIIPLHFPAPWKFFREEVEIRIFSDNPKLELENRLIARPQANHEFVQPLFVSRMPTRKMTGQGHMETIKSAKRLNEGLSVIKMLLTKLRLKDLESMVNREREKELYEALKARLEAFNDEPAKAFAEPFMKKGGAIVKSVRVEQVQKSGVLVRDGNGVADNASMVRVDVFTKGGKYFLVPIYTWQVAKGILPNKAVIQGKNEEDWEVMDDATFRFSLHQNDLVKLVTKKKTIFGYFNGLNRATGNIDIKEHDLEKSKVKDGIHQSIGIKLALSFEKYQVDELGKNIRLCKSSKRQAVR

SEQ ID NO: 457 - protein, 1338 aa, Helcococcus kunzii
MQDYYLGLDIGTNSVGWAVTDENYNLLRKKGKDLWGVRLFKEAQPATERRGHRSSRRRTIRKSLRKQLLRELFEEEINAIDKDFFLRLDESKYWLEDKKIEGKYSLFNDENFTDKDYYEKFPTIFHLRKALIESDDKEDIRLYFLAINQMMKRRGHFLIDGKLSNVEDITPFKECIQNLINEELDTEIETEFYDKAIKIVSDYSLKKTEKKNLIKDLVKETDSIEDSKKIINIFNLLISGKSKVNGIFDDEEILEKIKEDNKEDFYLTSEKYEENLEYFSQLLDYRFELISSLKSIYDYIILQEVLKGKKYLSYAQVERYKNHKEDLRKLKQLIKKYDKNGKIYYQIFRDENFKKGYVAYLGYYKKNKKNVPVKKCDYDTFSKNIKSTLDKICDKEDPLYIELIDKIEKGGFLLKQIVSTNSVIPHQVHELELDKILENLEKNYPSFKEISDGVSKIDKIKMIFNFRIPYYVGPLNDYHKDKVNSNTWIVKNEGFENENIRPWNFSKIVDEHACEEEFIKRMINECSYIPGEKVLPKSSLLYSEYMVLNELNNLRVNGDKLNPKIKKEIVENIYKKERKVTLKKIRNFLIINNYVDSKVEFSGLSDGIKANMSSYIDFAEILDDNFDNNMVEDLIEQITIHVGNVKLLTEKISNKYPNLEKKQINKIVNLKFKDWARFSRKLLVGIEGTEKETGEINTIIGFLRETNENFMELMSNRYTFSEEISEIKKKYIPNKLSKQIVDDLYVSPAVKKMIWQVLNINDELIKVLGKQPKKIFIEMARGKEEKPEVKDSRKNKLIELYKNLGKEGKEWLNRIEDKTEADFRNRALYLYYTQMGRCMYTGEIIDIERLYDKELYDLDHIIPRKMKKDDSIHKNLVLVTRNSNQYEKKDNYPVPEVIKSRENVRHLWYALKKKGLITEEKYNRLTRINPLSDKELSEFIERQLVETRQTTKVVKDLFENYYTDSKIVTVKAGLVSELRRDFEVLKCREINDLNHAHDAFLNIIVGDVWSKKFTSNPYNFVKKNREKYTLNNIFTKNQKDLRGNEIWNCAEGKKRIIKTLNKPSVLFSVENFEQTGQLFDQNIIGKQDYKEKTSYVPIKGDERLQDISKYGGYRGISGAYFFIVEHTEKNKRVKTIESLPIYMKSYVEENGLLDFCTNEMKLVDPKIIVKKLNYKSEIIVDGFKYLISGKTENRLSLETNEYLYWNHTQTTDIKKILNINEKIELEKYNGDIESERENIIKYIQIILEKFKLKPFIKRRNLPNIEINFADYETEKLLQLLVNLIPLTTKYVSPVDLTVISGSKYAGKVLIPKKISNLNEVIFISKSITGIYESRRRII

SEQ ID NO: 458 - protein, 1023 aa, Helicobacter cinaedi
MKIYSFDIGVASIGWAFIENEVLQDCGIRIFTKAENPKNGASLALPRREARGVRKRLARRRGRLNTIKQLLCKEFGLQLEDYLSNDGELPKAYTASKANPLKSPYELRTLALSQKLDSKDLVRVILHIAKHRGYGNKHAKDSKDTESGKVKKAIEFNRKTLAEKGYRSVGEYLYREFFQQSRISQNNGATEFINVRNKAGNYEHCVAQDMLKEELESILNAQRQFGFSLKQDFENKLLTKIFEQRPLKSFADKVGNCCFIAGEKRTPKDSLSAIEFIALSRTINTLINLSKESGEIYNRAIILQIVESTLKKGEISYKELREIIRLDERLRFKDPRLDYSREIKEAEKVKFLEFKQLKGFKKALGESFTTLARSQLDEIAEHIALIKDRVKLNEKLESYALTKEQREALSNLSFSAHINLSLQALKQILPFMRGDNGEQCLDYDESVEKAGLKALSKDTLKGQMLPPLNEFEPYLSNPVVARALAEYRKVLNALLKQYGSPHKIHIEYAREAKLSSTERQKYEKEQKDNYAANQAAHKKCQELGLEPSSTNLLKLKLWQEQGGLCLYSGAKITISYLQDPTALQVDHIYPYSRSFDDSYMNKCLVLTKANQEKGNRTPFEAFGTDSAKWGVITTLAQKLPHKKRRRILNTAFNDKEAGFKLRNLNDTSYIARLVADYTETYLEFLPLVESENTTLGKGQKGSKKHIAIVNGALTSTMRYYLGFASKDRDNHLHHALDAVIIGFMNDSVIKAFSDFKKTQETSKAAYYAHTLSKQEYKKQRAFIQLPSGENFRASVLEKVESVFVSKPPRKRVRGALHEATFYSPNDPKLLKNYGGTKGVERALALGKMRKVGAKIVSNGAMVRVDIFRHKSSGKFYGVPVYTMDFALGILPNKAVVVGKDKNGVIKDWLEMDSSYEFIFSLYKDDLLLVQKKEMAEPELCYFMSFNSSIAQISVAKHDNNFSTLTKNQKLLFSNATQEDVSGKSIGIQNLQVFEKWQVSVLGEVKRTQSYPRENISLASKAKK

SEQ ID NO: 459 - protein, 1023 aa, Helicobacter cinaedi
MKIYSFDIGVASIGWAFIENEVLQDCGIRIFTKAENPKNGASLALPRREARGVRKRLARRRGRLNTIKQLLCKEFGLQLEDYLSNDGELPKAYTASKANPLKSPYELRTLALSQKLDSKDLVRVILHIAKHRGYGNKHAKDSKDTESGKVKKAIEFNRKTLAEKGYRSVGEYLYREFFQQSRISQNNGATEFINVRNKAGNYEHCVAQDMLKEELESILNAQRQFGFSLKQDFESKLLTKIFEQRPLKSFADKVGNCCFIAGEKRAPKDSPSAIEFIALSRTINTLINLSKESGEIYNRAIILQIVESTLKKGEISYKELREIIRLDERLRFKDPRLDYSREIKEAEKVKFLEFKQLKGFKKALGESFTTLAISQLDEIAEHIALIKDRVKLNEKLESYALTKEQREALSNLSFSAHINLSLQALKQILPFMRGDNGEQCLDYDESVEKAGLKALSKDTLKGQMLPPLNEFEPYLSNPVVARALAEYRKVLNVLLKQYGSPHKIHIEYAREAKLSSTERQKYEKEQKDNYAANQAAHKKCQELGLEPSSTNLLKLKLWQEQGGLCLYSGAKITISYLQDPTALQVDHIYPYSRSFDDSYMNKCLVLTKANQEKGNRTPFEAFGTDSAKWGVITTLAQKLPHKKRRRILNTAFNDKEAGFKLRNLNDTSYIARLVADYTETYLEFLPLVESENTTLSKGQKGSKKHIAIVNGVLTSTMRYYLGFASKDRDNHLHHALDAVIIGFMNDSVIKAFSDFKKTQETSKAAYYAHTLSKQEYKKQRAFIQLPSGENFRVSVLEKVESVFVSKPPRKRVRGALHEATFYSPNDPKLLKNYGGTKGVERALALGKMRKVGAKIVSNGAMVRVDIFRHKSSGKFYGVPVYTMDFALGILPNKAVVVGKDQNGVIKDWLEMDSSYEFIFSLYKDDVILVQKKEMQRPELCYFVSFDTSGASIKVAKHDNNFSTLTENQKLLFSNATKEEVVGKSIGIQNLKVFEKWQVSVLGEVKRTQSYPRENISLASKAKK

SEQ ID NO: 460 - protein, 344 aa, Helicobacter pullorum
MKILGFDIGIASIGWAFVENGELKDCGVRIFTKAENPKTGDSLAMPRREARSVRRRLARRKGRLETLKRLLAKEWDLCYEDYIAADGELPKAFMGKNLTNPYVLRYEALQRLLSKEELVRVVLHIAKHRGYGNKNAKITKSEESKREQGKILSALATNASVIARYRTVGEYFYKEFCEVIKNPQGLNTNENCTQPKVRVLKPIRNKGGEYTNCILQEDLQRELRCIFEHQKGFGFSITQEFQDKILKIAFYQRSLKDFSHLVGKCTFYPDEPRAPKFSLSAIEFITKAKAINLLASIAKESGEVWDKEQWRERLDSVFSAVCERGINTIPSSSHFLNIFDILYL

SEQ ID NO: 461 - protein, 1688 aa, Ignavibacterium album
MEFKKVLGLDIGTNSIGCALLSLPKSIQDYGKGGRLEWLTSRVIPLDADYMKAFIDGKNGLPQVITPAGKRRQKRGSRRLKHRYKLRRSRLIRVFKTLNWLPEDFPLDNPKRIKETISTEGKFSFRISDYVPISDESYREFYREFGYPENEIEQVIEEINFRRKTKGKNKNPMIKLLPEDWVVYYLRKKALIKPTTKEELIRIIYLFNQRRGFKSSRKDLTETAILDYDEFAKRLAEKEKYSAENYETKFVSITKVKEVVELKTDGRKGKKRFKVILEDSRIEPYEIERKEKPDWEGKEYTFLVTQKLEKGKFKQNKPDLPKEEDWALCTTALDNRMGSKHPGEFFFDELLKAFKEKRGYKIRQYPVNRWRYKKELEFIWTKQCQLNPELNNLNINKEILRKLATVLYPSQSKFFGPKIKEFENSDVLHIISEDIIYYQRDLKSQKSLISECRYEKRKGIDGEIYGLKCIPKSSPLYQEFRIWQDIHNIKVIRKESEVNGKKKINIDETQLYINENIKEKLFELFNSKDSLSEKDILELISLNIINSGIKISKKEEETTHRINLFANRKELKGNETKSRYRKVFKKLGFDGEYILNHPSKLNRLWHSDYSNDYADKEKTEKSILSSLGWKNRNGKWEKSKNYDVFNLPLEVAKAIANLPPLKKEYGSYSALAIRKMLVVMRDGKYWQHPDQIAKDQENTSLMLFDKNLIQLTNNQRKVLNKYLLTLAEVQKRSTLIKQKLNEIEHNPYKLELVSDQDLEKQVLKSFLEKKNESDYLKGLKTYQAGYLIYGKHSEKDVPIVNSPDELGEYIRKKLPNNSLRNPIVEQVIRETIFIVRDVWKSFGIIDEIHIELGRELKNNSEERKKTSESQEKNFQEKERARKLLKELLNSSNFEHYDENGNKIFSSFTVNPNPDSPLDIEKFRIWKNQSGLTDEELNKKLKDEKIPTEIEVKKYILWLTQKCRSPYTGKIIPLSKLFDSNVYEIEHIIPRSKMKNDSTNNLVICELGVNKAKGDRLAANFISESNGKCKFGEVEYTLLKYGDYLQYCKDTFKYQKAKYKNLLATEPPEDFIERQINDTRYIGRKLAELLTPVVKDSKNIIFTIGSITSELKITWGLNGVWKDILRPRFKRLESIINKKLIFQDEDDPNKYHFDLSINPQLDKEGLKRLDHRHHALDATIIAATTREHVRYLNSLNAADNDEEKREYFLSLCNHKIRDFKLPWENFTSEVKSKLLSCVVSYKESKPILSDPFNKYLKWEYKNGKWQKVFAIQIKNDRWKAVRRSMFKEPIGTVWIKKIKEVSLKEAIKIQAIWEEVKNDPVRKKKEKYIYDDYAQKVIAKIVQELGLSSSMRKQDDEKLNKFINEAKVSAGVNKNLNTTNKTIYNLEGRFYEKIKVAEYVLYKAKRMPLNKKEYIEKLSLQKMFNDLPNFILEKSILDNYPEILKELESDNKYIIEPHKKNNPVNRLLLEHILEYHNNPKEAFSTEGLEKLNKKAINKIGKPIKYITRLDGDINEEEIFRGAVFETDKGSNVYFVMYENNQTKDREFLKPNPSISVLKAIEHKNKIDFFAPNRLGFSRIILSPGDLVYVPTNDQYVLIKDNSSNETIINWDDNEFISNRIYQVKKFTGNSCYFLKNDIASLILSYSASNGVGEFGSQNISEYSVDDPPIRIKDVCIKIRVDRLGNVRPL

SEQ ID NO: 462 - protein, 1354 aa, Indibacter alkaliphilus
MKKILGLDLGTTSIGWAFIKEPEKDVVGSEIVDMGVRIVPLSSDEENDFAKGNTISINADRTLKRGARRNLQRFKQRRNALLETFKEKNLIPSNFQYAEDGPSSTFSTLKLRDKAAKEKIELDDFVKVLLQINKKRGYKSSRKAMSEEDEGTAIDSMGIAKELYENDLTPGQWVYEALKNGRKNVPDFYRSDLQEEFKKIVNYQSEFYPDILNTSFVEDWMGKASTPTKQYFNKRGVQLAENKGKREERRLQEYKWRAEAVNFKIDLSEIALILSQINSQISNSSGYLGAISDRSKELYFKNLTVGQYLYQQVKKNPHTRLKGQVFYRQDYLDEFEKIWSVQSSFYPQLNDELKQEVRDVTIFFQRRLKSQKHLISNCEFEEHHKVVPKSHPIFQEFRIWQNLNNLTLIKKDNLNEKCELALEDKTALANELAFKKELSVKDALKVLGLKPSDWEFNFTKIEGNRTNHAFFEAFAKIIELEDGEPIDLGNLKADDILDQFSEAFLRIGIDTELLQVNSDIEGAEYEKQSYIQFWHLLYSSEDDQKLKQNLIRKFGFKPEHAKILASISLQDDHASLSSRAIKKILPHLQSGLIYDKACTYAGYNHSSSFTKDENEKRELRAELELLKKNSLRNPVVEKILNQMINVVNAILKDPNLGRPDEIRVEMARELKANAEQRKNMTSNIASATRDHEKYREILKKEFGLKRVTKNDLLRYKLWLETDGISLYTGKPIEASKLFSKEYDIEHIIPKARLFDDSFSNKTICERQLNIDKANVTAFSFLQNKLSADEFEQYQSRVKSLYGKLSKAKIQKLLMANDKIPEDFIARQLQETRYISKKAKEILFEITMRVSVTTGTITDKLREDWGLVEIMKELNWEKYDKLGLTYTIEGKHGERLNKIKDWNKRNDHRHHAMDALTVALTKPAYIQYLNNLNAKAIGNKKGTEIFAIEQKYLKRENGKLCFIPPIENIRAEAKKHLSKILVSYKAKNKVVTINKNKTKKKAGFNEQTALTPRGQLHKETVYGKSFHYSTKFEKIGASFDAQKINTVAKKEEREALLKRLAENGNDPKKAFTGKNSLNKMPIYLDLGKNIKLSEKVKTVVLEQNYTIRKNIDPDLKVDKVIDVGIKRILESRLEEFGGNAKLAFSNLEENPIWLNKEKGIPIKRVKISGVSNVESLHVKKDHFGEKILDEEGNEIPVDFVSTGNNHHVAIYEDEDGNLQDEVVNFYEAVIRRNQGESIIKYRHEEGWNFLYSIKQNEFFVFPSQDFNPNDFDLLDPKNYDLISPNLYRAQKFSKVMYGNSAVRDYVFRHHLETVLNDVKELKDVAYKQLKSLQYLNGIKKVRLNHLGQIIQVGEY

SEQ ID NO: 463 - protein, 1397 aa, Joostella marina
MKKVLGLDLGTNSIGWALVNEATKEEKKEGKSSEIIKLGVRVNPLTVDEKTNFEKGRPLSTNADRTLKRSARRNLQRYKLRRRNLIEILIKNGFITKDTPLTETGKDTTHQTLKLRAKSAKEKVDLKDFAKILLTINKKRGYKSSRKVNSDEDGLAIDGMAVAKHLYEQNLTPGQYVLNLLQKNKKYVPDFYRSDLQEEFKNIWNNQKTYYFDILTDTLFEELKDKNKSQTWAICKKPFDIAGIKQIGKASDKRLERYKWRTEGLTQKLNLEYLAIALQEINNDINKSSGYLGAISDRSKELFFNKETVGENLYRQLVKTPHTSLRNQVFYRQDYLDEFETIWETQAKFYPQLTHTLKEEIRDVIIFYQRKLKSQKSLISFCQFESWEQTYIEKETGKSKTRTVGRKVIPKSSPLFQEFKIWQNLNSLEFRNSDEGEIIEFIKLDEDIRQTVFEELNLRGNLKPNDVLKILGNYISLGKVSQWKCNFEEIEGNRTNAALYNVYQIIAENEGYGFDWAKKTASEINKELKNIFPQLGIDASILDFDFTQANFDKQTSYQLWHLLYSAEEDFKISEEDKVLYGNSSVSLKKKLHQKYGFKPEYTKLLTNISLQPDYGNLSAKAICNILPYLKENNVYSEACDLTGYNHSNFLTAEEQAKRPLKPILELLKKNSLRNPVVEKILNQMVNVVNQVIETYGKPDEIRIELTRELKKSAKERANMTKSIADATRRNDDYRKTIIKEFGIPNPTKSDVVRYRLWQELASRGYKDIFTDTEIKPQELFSNKIDIEHIIPKALLFDDSFSNKTLAFKKDNLKKANRTAYDFIANDYAPNLENYIERVESLHKDRKITRAKRNKLLMLQSKLPDGFIERDLRNSQYITKEAKKMLYEVCRTVVSTSGSITDKLREDWDLINVMKELNFPKYKALGLTEKIERYDIGAEKMKEVEIIEDWNKRNDHRHHAIDALTVAFSTHSHIQYLNHLNARRDEGHKKHAAIIAIESTITEKEGNKKRRFIAPLPNFRLQAKEHIESILVSFKNKNKVVTNNINKTKRIKKDKFNTKVQLTPRGQLHKETIYGKIKQPLEKHIKLNKSFTLEQAKLIIDKRQREKVLNHLEKYAHNSDIAFNSKTLKKNPLLISDEPLKEVLCFEEVFTIRKDISYDNFKNEKQLDKVIDEKVKQALKERINQYNGDFREAFSDIERNPIWLNKAKGICVKRATIKGVSNAEPLHTAKNHLGEEVLTENKEQIPVDYVSTGNNHHVAIYEDEDGNLQEKVVSFYEAVIRVNEGLPIIDKEYNKSLGWTFKFTMKQNEMFVFPSEDFNPTEIDLLDQKNASLISPNLFRVQKFTIKDYFFRHHLETTVENNNTLKNTTWRREGLSGIYGIIKIRLNHLGEIVQVGEY

SEQ ID NO: 464 - protein, 1060 aa, Kingella kingae
MAAKSLNYILGLDLGIASCGWAVVEMDEQENPLRLIDVGVRTFEEAENPKDGSSLAETRRLARAQRRLISRRANRMNKLCRLLKQENVLQANDYDEKGLIIGLPNQAWELRAQGLDRKLEPKEWAAVLIHLVKHRGYLSQRKNESQTADKELGALLSGMNHNHQLLQSQSNQYRTPAELAIKQFATQDGHIRNQRGAYTHTFNRLDLQNELNQLFDAQTRLGNPHVSGSLKTAINDLLMNQKAALSGDAILEMLGRCTFEPSEYKAAKNTYSAERFVWLGKLTNLRIQDNGLESALSREQRELLLNEPYNKTKLTYQQVRKLLRLPETAFFKGLRYGKDNAESATFMEMKSYHAIRKSLENKSLKSEWEKLKTQPKLLDLIGTAFSIYKTDDEIAGCLKNQLPENVIIALQGQLNFSNFMELSLKALEKLLPLMEQGLRYDEACTQIYGNRHEKIADKTEKFLPNIPADKLRNPVVLRTLTQARKVINAIIRRYGSPARVHIETGREVGKSFSDRDKLKKQQEENQEQRRRAIDEWKQFFPNAAHEPKAVDILKLRLYQLQQGKCLYSGLPIDVRRLPEKGYVEIDHALPFSRTWDDSFNNKILVLASENQNKGNQTPYEYLRGADNSESWRLFVENVQNCQFSPNKKQKIMAKQLDEKGFLERNLNDTRYVSRFLCQFISEHLHLTGKGKKRVFASNGQITALLRGRWGLSKNREENDRHHAVDAVVVACSTVAMQQKITQFVRYQKGNVFTGERIDKETGEVISIHFPTPWEHFREEVMIRVFDDNPLRTLPEKLPNRPEALHEYVMPLFVSRMPTRKMTGQGHKETIKSAKRLDEKISVLRVPLTQLKLNDLENMVNREREPALYEALKARLEQFKNDPAKAFAEPFFKQGGQQVKAVRVEIVQKSGMLLRKINGVADNGSMVRVDVFEKSGKFYLVPIYAWQVAEGILPNYAVVAHKDESDWILMDESYHFKFALYKNDLLEVQTKKGGIMGYFASLDRATGAITIREHDRDKKKCKDGEHRSIGVKMASSFKKLQVDELGKNIHETRSRKRPNIG

SEQ ID NO: 465 - protein, 1314 aa, Lactobacillus animalis
MLKKDYSIGLDIGTNSVGHAVVTDDYKVPTKKMKVFGDTSKKTIKKNMLGVLLFNEGQTAADTRLKRGTRRRYTRRKNRLRYLQEIFAPELAKVDPNFLYRLEESSLVAEDKKYDVYPIFGKREEELLYHDTYKTIYHLRSALANNDQPADLRLVYLALAHIIKYRGNFLLEGEIDLRTTDINKVFAEFSETLNENSDENLGKLDVADIFKNNTFSKTKKSEELLKLSGAKKNQLAHQLFKMMVGNMGSFKKVLGTDEEHKLSFGKDTYEDDLNDLLAEAGDQYLDIFVAAKKVYDAAILASILDVKDTQTKTVFSQAMIERYEEHQKDLIELKRVFKKYLPEKCHDFFSEPKISGYAGYIDGKVSEEDFYKYTKKTLKGIPETEEILQKIDANNYLRKQRTFDNGAIPHQVHLKELVAIVENQGKYYPFLRENKDKFEKILNFRIPYYVGPLARGNSKFAWLTRAGEGKITPYNFDEMIDKETSAEDFIKHMTINDLYLPTEPVLPKHSLLYERYTIFNELAGVRYVTENGEAKYFDAQTKRSIFELFKLDRKVSEKMVIKHLKVVMPAIRIQALKGLDNGKFNASYGTYKDLVDMGVAPELLNDEVNSEKWEDIIKTLTIFEGRKLIKRRLENYRDFLGEDILRKLSRKKYTGWGRLSAKLLDGIYDKKTHKTILDCLMTEDYSQNFMQLINDDNYSFKETIKNAQVIEKEETLAKTVQELPGSPAIKKGILQSLEIVDEIIKVMGYKPKSIVVEMARETQKTHGTRKREDRVQQIVENLKDANELPEKLPSNAELSDERKYLYCLQNGRDMYTGAPLDYDHLQFYDVDHIIPQSFLKDDSIENKVLTIKKENVRKTNGLPSEAVIQKMGSFWKKLLDAGAMTNKKYDNLRRNLHGGLNEKLKERFIERQLVETRQITKYVAQLLDQRLNYDGNGVELDEKIAIVTLKAQLASQFRSEFKLRKVRALNNLHHAHDAYLNAIVANLIMAKYPELEPEFVYGKYRKAKFKGLGKATAKNTLYANVLYFLKENEVYPFWDKARDLPTIKRYLYRAQVNKVRKAERQIGGFSDEMLVPKSDSGKLLPRKEGLDPVKYGGYAKAVESYAVLITADEVKKGKTKKVKTLVNIPIIDSKKYEADPTAYLASRGYTNVTNSFILPKYSLLEDPEGRRRYLASFKEFQKANELILPQHLVELLYWVNAKDGEQKLEDHKAEFKELFDKIMEFADKYVVAPKNSEKIRRLYEENQDATPMELGKNFVELLRYTADGAASDFKFFGENIPRKRYNSAGSLLNGTLIYQSKTGLYETRIDLGKL

SEQ ID NO: 466 - protein, 1371 aa, Lactobacillus buchneri
MKVNNYHIGLDIGTSSIGWVAIGKDGKPLRVKGKTAIGARLFQEGNPAADRRMFRTTRRRLSRRKWRLKLLEEIFDPYITPVDSTFFARLKQSNLSPKDSRKEFKGSMLFPDLTDMQYHKNYPTIYHLRHALMTQDKKFDIRMVYLAIHHIVKYRGNFLNSTPVDSFKASKVDFVDQFKKLNELYAAINPEESFKINLANSEDIGHQFLDPSIRKFDKKKQIPKIVPVMMNDKVTDRLNGKIASEIIHAILGYKAKLDVVLQCTPVDSKPWALKFDDEDIDAKLEKILPEMDENQQSIVAILQNLYSQVTLNQIVPNGMSLSESMIEKYNDHHDHLKLYKKLIDQLADPKKKAVLKKAYSQYVGDDGKVIEQAEFWSSVKKNLDDSELSKQIMDLIDAEKFMPKQRTSQNGVIPHQLHQRELDEIIEHQSKYYPWLVEINPNKHDLHLAKYKIEQLVAFRVPYYVGPMITPKDQAESAETVFSWMERKGTETGQITPWNFDEKVDRKASANRFIKRMTTKDTYLIGEDVLPDESLLYEKFKVLNELNMVRVNGKLLKVADKQAIFQDLFENYKHVSVKKLQNYIKAKTGLPSDPEISGLSDPEHFNNSLGTYNDFKKLFGSKVDEPDLQDDFEKIVEWSTVFEDKKILREKLNEITWLSDQQKDVLESSRYQGWGRLSKKLLTGIVNDQGERIIDKLWNTNKNFMQIQSDDDFAKRIHEANADQMQAVDVEDVLADAYTSPQNKKAIRQVVKVVDDIQKAMGGVAPKYISIEFTRSEDRNPRRTISRQRQLENTLKDTAKSLAKSINPELLSELDNAAKSKKGLTDRLYLYFTQLGKDIYTGEPINIDELNKYDIDHILPQAFIKDNSLDNRVLVLTAVNNGKSDNVPLRMFGAKMGHFWKQLAEAGLISKRKLKNLQTDPDTISKYAMHGFIRRQLVETSQVIKLVANILGDKYRNDDTKIIEITARMNHQMRDEFGFIKNREINDYHHAFDAYLTAFLGRYLYHRYIKLRPYFVYGDFKKFREDKVTMRNFNFLHDLTDDTQEKIADAETGEVIWDRENSIQQLKDVYHYKFMLISHEVYTLRGAMFNQTVYPASDAGKRKLIPVKADRPVNVYGGYSGSADAYMAIVRIHNKKGDKYRVVGVPMRALDRLDAAKNVSDADFDRALKDVLAPQLTKTKKSRKTGEITQVIEDFEIVLGKVMYRQLMIDGDKKFMLGSSTYQYNAKQLVLSDQSVKTLASKGRLDPLQESMDYNNVYTEILDKVNQYFSLYDMNKFRHKLNLGFSKFISFPNHNVLDGNTKVSSGKREILQEILNGLHANPTFGNLKDVGITTPFGQLQQPNGILLSDETKIRYQSPTGLFERTVSLKDL

SEQ ID NO: 467 - protein, 315 aa, Lactobacillus casei
MFKDYLKQLEDDGTAKAIRQLYDRYIDGDDAKPFVREDFVKALTKEVTAHPNAKSPELLERLAQPDFMLKQRNKANGAIPVQMQQRELDQIIKNQSVYYDWLAAPNPVEKHRKSMPYQLDELLNFRIPYYVGPLVTAKEQKAARGGVFAWMVRKDPDGNITPYNFDEKVDREASANTFIQRMKTTDTYLIGEDVLPKQSLLYQSYEVLNELNNVRVNDNKLSFDQKQQVLGELFERHNTVTIKQFVDNLLAHGDYDRIPEVRGLADEKRFLSSLSTYNQLKGILHEAIDDSDKQTDMVDCKINPNAVRTKKISFL

SEQ ID NO: 468 - protein, 236 aa, Lactobacillus casei
MFKDYLKQLEDDGTAKAIRQLYDRYIDGDDAKPFVREDFVKALTKEVTAHPNAKSPELLERLAQPDFMLKQRNKANGAIPVQMQQRELDQIIKNQSVYYDWLAAPNPVEKHRKSMPYQLDELLNFRIPYYVGPLVTAKEQKAARGGVFAWMVRKDPDGNITPYNFDEKVDREASANTFIQRMKTTDTYLIGEDVLPKQSLLYQSYEVLNELNNVRVNDNKLSSSIFKSSATMITNS

SEQ ID NO: 469 - protein, 1389 aa, Lactobacillus casei
MIIRTYELKTITTIAILKMFQLLTGGLSMTKLGKPYGIGVDIGSNSIGFAAVDENSHLIRLKGKTVIGARLFEEGKAAADRRASRTTRRRLSRNRWRLSFLRDFFESHITPTGPNFFMRQKYSEISPKDKARYKYEKRLFNDRTDAEFYQQYPTMYHLRNRLLTDPSKADVREIYFAIHHILKSRGHFLTSGYAKDFNTNKVALNEIFPALQDAYAQVYPDLDITFDENKVNEFKTVLLNEKATPSDTQRALVNLLLAEDGDKDILKQQKQVLTEFAKAVVGLKTKLNVALGTEVDSSEATVWNFSLGQLDDKWAGIESAMTDEGTEILDQIRDLYRARLLNGIVPAGKTLSQAKVDDYAQHHEDLELFKDYLKQLEDDGTAKAIRQLYDRYIDGDDAKPFVREDFVKALTKEVTAHPNAKSPELLERLAQPDFMLKQRNKANGAIPVQMQQRELDQIIKNQSVYYDWLAAPNPVEKHRKSMPYQLDELLNFRIPYYVGPLVTAKEQKAAQGGVFAWMVRKDPDGNITPYNFDEKVDREASANTFIQRMKTTDTYLIGEDVLPKQSLLYQRYEVLNELNNVRVNNEKLSIEQKQQVIRELFERHNSVTIKQFAENLRAHGDYAHIPEIRGLADEKRFLSSLSTYRQLKSLLPDAIDDPAKQADIENIIAWSTVFEDAAIFKTKLKEINWLDSQTITKLSNIRYRGWGQFSHKFLNGLTLGNGHTIIQELFLSNNNLMQILTDETLQKKMTELNADKLKAANINDAIDDAYTSPSNKKALRQVLRVIEDIKRAADGQDPSWLYVETADGGGTPGKRTRARQHQLQEIYANAAHELIDSAVRGELEDKIADKADFNDRLVLYFMQGGRDIYTGTPLNIDQLSSYDIDHILPQSLIKDNSLDNRVLVHAIINREKNATFASTIYAQKMNATWRQWHEAGLISGRKLRNLQMRPDQIDKYASGFVARQLVETRQIIKLTEQIVAAQYPETKIIAVKAGLSHQLREELEFPKNRDVNHYHHAFDAFLAARIGTYLLKRFPNLQAFFTYGKFKKADVKKLRGFNFIRDITHAEDKIVVKDTGEVIWDKKRDVDELDRIYNFKRMLITHEVHFEKADLFKQTVYGAKDSKEAGGKKQLISKKKGYPVDIYGGYTQETGSYLSVVRLTKKAMYAVVKVSTRDAAKLAVAKSISEQKENETLNDIIDEKLSKISKNGKITHELFEVVLPRVGQKTLFKNSKYNLFLVNSDTYMHNYQELWMPREYQKMWKDISLSKYGDAQTEDQLDQIFGFIVSQVNSYFNLYDINQFRKKLNDAADKFATLPMRDTDDMQGKIATIGQLLIGLQANAARSDLRNLDIKTPLGLLQIPNGISLDSDTSVVYQSPTGLLEREVHLSDL

SEQ ID NO: 470 - protein, 412 aa, Lactobacillus casei
MIKDNSLDNRVLVHPLVNREKDTIFASTRFAKQTNGMWRQWHAAGLISSRKLRNLQMRPDEIDKYASGFVARQLVETRQIIKLTEQIVADQYPDTKIIAVKAGLSSQLRKELDFPKNREVNHYHHAFDAFLAARIGTYLLKRYPNLEPFFTYGKFKKTEVKKLKSFNFIRDMTHAKDKIVAKETGEIVWDNASDINELDRIYNFKRMLITHEVRFETASLFKQTLYAAKNPKNRGGSRQLIPKKKGYLVDIYGGYTQETGSYLSVVRLTKKAMYAVVKVSTRDAAKLAVAKSISEQKENETLKKIIDGKLSKTSKKGKTTHQLFEIVLPRVGQKTLFKNSKYNQFLVNSDTYMHNYQELWMPREYQRMWKDILLSNHGDAQIEGQLDQIFKFIVSQVNSYFNLYDINQFRKK

SEQ ID NO: 471 - protein, 234 aa, Lactobacillus casei
MKVTKKTETIFKVVKIATSQVAALNKARSRSTAEELSVLTELLKPKFSKVGKNGKITDTPFEVVLPRVPREQLFYNAKYGFFMVNSDTMFHNFQEIWVSRSDQKILQQIRKAKIDYPNVDQDLDNLFHNLADQIVKYFDLYSIAGFKEKISQSQNTFNDLAVDDTDQSVGKITVINELLKGAQANGMTGSLKVLKISTPFGFTQDKSGVLTKDSSIIYQSPTGLFERSVRLTDL

SEQ ID NO: 472 - protein, 566 aa, Lactobacillus casei
MQILTDEVLKQKIAELNAHELKASGIYAAIDDAYTSPSNKKALRQVLSVIDDITNAAGQAPNWLYIETADGDGVPGKRTNSRQRKIQEIYVNAAQELITSSVRGELEDKIASRADFTDRLVLYFMQGGRDIYTGEPLNIDNLSSYDIDHILPQSLIKDNSLDNRVLVHPLVNREKDTIFASTRFAKQMNGMWRQWHAAGLISSRKLRNLQMRPDEIDKYASGFVARQLVETRQIIKLTEQIVADQYPDAKIIAVKAGLSSQLRKELDFPKNREVNHYHHAFDAFLAARIGTYLLKRYPNLEPFFTYGKFKKTEVKKLKSFNFIRDMTHAKDKIVAKETGEIVWDNASDINELDRIYNFKRMLITHEVRFETASLFKQTLYAAKNSKNRGGSRQLIPKKKGYLVDIYGGYTQETGSYLSVVRLTKKAMYAVVKVSTRDAAKLAVAKSISEQKENETLKKIIDGKLSKTSKKGKTTHQLFEIVLPRVGQKTLFKNSKYNQFLVNSDTYMHNYQELWMPREYQRMWKDILLSNHGDAQLEGQLDQIFKFIVSQVNSYFNLYDINQFRKK

SEQ ID NO: 473 - protein, 1363 aa, Lactobacillus casei
MTKLGKPYGIGVDIGSNSIGFAAVDENSHLIRLKGKTVIGARLFEEGKAAADRRASRTTRRRLSRNRWRLSFLRDFFESHITPTDPNFFMRQKYSEISPKDKARYKYEKRLFNDRTDAEFYQQYPTMYHLRNRLLTDPSKADVREIYFAIHHILKSRGHFLTSGYAKDFNTNKVALNEIFPALQDAYAQVYPDLDITFDENKVNEFKTVLLDEKATPSDTQRALVNLLLAEDGDKDILKQQKQVLTEFAKAVVGLKMKLNVALGTEVDSSEATAWNFSLGQLDDKWAGIESAMTDEGTEILDQIRDLYRARLLNGIVPAGKTLSQAKVDDYEQHHEDLELFKDYLKQLEDDGMAKVIRQLYDRYIDGDDAKPFVREDFVKALTKEVTAHPNAKSPELLERLVQPDFMLKQRNKANGAIPVQMQQRELDQIIKNQSVYYDWLAAPNPVEKHRQSMPYQLDELLNFRIPYYVGPLVTAKEQKAAQGGVFAWMVRKDPDGNITPYNFDEKVDREASANTFIQRMKTTDTYLIGEDVLPKQSLLYQSYEVLNELNNVRVNDNKLSFDQKQQVLGELFERHNTVTIKQFVDNLLAHGDYDRIPEVRGLADEKRFLSSLSTYNQLKGILHEAIDDSDKQTDIEKIIAWSTIFEDKAIFKTKLNEISWLTAGMINSLANIRYRGWGQFSHKLLNELTLSTGRTVFEELLISSHNLMQILTDEVLKQKIAELNAHELKASGIYAAIDDAYTSPSNKKALRQVLSVIDDITNAAGQAPNWLYIETADGDGVPGKRTNSRQRKIQEIYANAAQELITGSVRGELEDKIASRADFTDRLVLYFMQGGRDIYTGEPLNIDNLSSYDIDHILPQSLIKDNSLDNRVLVHPLVNREKDTIFASTRFAKQMNGMWRQWHAAGLISSRKLRNLQMRPDEIDKYASGFVARQLVETRQIIKLTEQIVADQYPDAKIIAVKAGLSSQLRKELDFPKNREVNHYHHAFDAFLAARIGTYLLKRYPNLEPFFTYGKFKKTEVKKLKSLKSFNFIRDMTHAKDKIVAKETGEIVWDNASDINELDRIYNFKRMLITHEVRFETASLFKQTLYAAKNSKNRGGSRQLIPKKKGYLVDIYGGYTQETGSYLSVVRLTKKAMYAVVKVSTRDAAKLAVAKSISEQKENETLKKIIDGKLSKTSKKGKTTHQLFEIVLPRVGQKTLFKNSKYNQFLVNSDTYMHNYQELWMPREYQRMWKDILLSNHGDAQLEGQLDQIFKFIVSQVNSYFNLYDINQFRKKIADATDKFAKLPTHDTDNARGKIATIGQLLIGLQANAMRSDLRNLDIKTPFGLLQIGTGITLDLDTSIIYQSPTGLFEREVPLTDL

SEQ ID NO: 474 - protein, 1360 aa, Lactobacillus casei
MTKLGKPYGIGVDIGSNSIGFAAVDENSHLIRLKGKTVIGARLFEEGKAAADRRASRTTRRRLSRNRWRLSFLRDFFESHITPTDPNFFMRQKYSEISPKDKARYKYEKRLFNDRTDAEFYQQYPTMYHLRTRLLTDPSKADVREIYFAIHHILKSRGHFLTPGYAKDFNTNKVALNEIFPALQDAYAQVYPDLDITFDENKVNEFKTVLLNEKATPSDTQRALVNLLLAEDGDKDILKQQKQVLTEFAKAVVGLKTKLNVALGTEVDSSEATVWNFSLGQLDDKWAGIESAMTDEGTEILDQIRDLYRARLLNGIVPAGKTLSQAKVDDYAQHHEDLELFKDYLKQLEDDGTAKAIRQLYDRYIDGDDAKPFVREDFVKALTKEVTAHPNAKSPELLERLAQPDFMLKQRNKANGAIPVQMQQRELDQIIKNQSVYYDWLAAPNPVEKHRKSMPYQLDELLNFRIPYYVGPLVTAKEQKAAQGGVFAWMVRKDPDGNITPYNFDEKVDREASANTFIQRMKTTDTYLIGEDVLPKQSLLYQSYEVLNELNNVRVNDNKLSFDQKQQVLGELFERHNTVTIKQFVDNLLAHGDYDRIPEVRGLADEKRFLSSLSTYNQLKGILHEAIDDADKQTDIENIIAWSTIFEDKAIFKTKLNEISWLNAGMINSLANIRYRGWGQFSHKLLNELTLSTGRTVFEELLISSRNLMQILTDEVLKQKIAELNAHELKASGIYAAIDDAYTSPSNKKALRQVLSVIDDITNAAGQAPNWLYIETADGDGVPGKRTNSRQRKIQEIYANAAQELITGSVRGELEDKIASRADFTDRLVLYFMQGGRDIYTGEPLNIDNLSSYDIDHILPQSLIKDNSLDNRVLVHPLVNREKDTIFASTRFAKQMNGMWRQWHAAGLISSRKLRNLQMRPDEIDKYASGFVARQLVETRQIIKLTEQIVADQYPDTKIIAVKAGLSSQLRKELDFPKNREVNHYHHAFDAFLAARIGTYLLKRYPNLEPFFTYGKFKKTEVKKLKSFNFIRDMTHAKDKIVAKETGEIVWDNASDINELDRIYNFKRMLITHEVRFETASLFKQTLYAAKNSKNRGGSRQLIPKKKGYLVDIYGGYTQETGSYLSVVRLTKKAMYAVVKVSTRDAAKLAVAKSISEQKENETLKKIIDGKLSKTSKKGKTTHQLFEIVLPRVGQKTLFKNSKYNQFLVNSDTYMHNYQELWMPREYQRMWKDILLSNHGDAQLEGQLDQIFKFIVSQVNSYFNLYDINQFRKKIADATDKFAKLPTHDTDNARGKIATIGQLLIGLQANAMRSDLRNLDIKTPFGLLQIGTGITLDLDTSIIYQSPTGLFEREVPLTDL

SEQ ID NO: 475 - protein, 700 aa, Lactobacillus casei
MTKLGKPYGIGVDIGSNSIGFAAVDENSHLIRLKGKTVIGARLFEEGKAAADRRASRTTRRRLSRNRWRLSFLRDFFESHITPTDPNFFMRQKYSEISPKDKARYKYEKRLFNDRTDAEFYQQYPTMYHLRTRLLTDPSKADVREIYFAIHHILKSRGHFLTSGYAKDFNTNKVALNEIFPALQDAYAQVYPDLDITFDENKVNEFKTVLLDEKATPSDTQRALVNLLLAEDGDKDILKQQKQVLTEFAKAVVGLKTKLNVALGTEVDSSEATAWNFSLGQLDDKWAGIESAMTDEGTEILDQIRDLYRARLLNGIVPAGKTLSQAKVDDYEQHHEDLELFKDYLKQLEDDGMAKAIRQLYDRYIDGDDAKPFVREDFVKALTKEVTAHPNAKSPELLERLVQPDFMLKQRNKANGAIPVQMQQRELDQIIKNQSVYYDWLAAPNPVEKHRQSMPYQLDELLNFRIPYYVGPLVTAKEQKAAQGGVFAWMVRKDPDGNITPYNFDEKVDREASANTFIQRMKTTDTYLIGEDVLPKQSLLYQSYEVLNELNNVRVNDNKLSFDQKQQVLGELFERHNTVTIKQFVDNLLAHGDYDRIPEVRGLADEKRFLSSLSTYNQLKGILHEAIDDSDKQTDIEKIIAWSTIFEDKAIFKTKLNEISWLNAGMINSLANIRYRGWGQFSHKLLNELTLSTGRTVFEA

SEQ ID NO: 476 - protein, 330 aa, Lactobacillus casei
MTKLGKPYGIGVDIGSNSIGFAAVDENSHLIRLKGKTVIGARLFEEGKAAADRRASRTTRRRLSRNRWRLSFLRDFFESHITPTDPNFFMRQKYSEISPKDKNRYKYEKRLFNDRTDAEFYQQYPTMYHLRNRLLTDPSKADVREIYFAIHHILKSRGHFLTPGDAKDFNTNKVALNEIFPALQDAYAQVYPDLDITFDENKMNEFKTVLLNEKATPSDTQRALVNLLLAEDGDKDILKQQKQVLTEFAKAVVGLKTKLNVALGTEVDSSEATAWNFSLGQLDDKWAGIESAMTDEGTEILDQIRDLYRARLLNGIVPAGKTLSQAKVDD

SEQ ID NO: 477 - protein, 330 aa, Lactobacillus casei
MTKLGKPYGIGVDIGSNSIGFAAVDENSHLIRLKGKTVIGARLFEEGKAAADRRASRTTRRRLSRNRWRLSFLRDFFESHITPTDPNFFMRQKYSEISPKDKNRYKYEKRLFNDRTDAEFYQQYPTMYHLRNRLLTDPSKADVREIYFAIHHILKSRGHFLTPGDAKDFNTNKVALNEIFPALQDAYAQVYPDLDITFDENKMNEFKTVLLNEKATPSDTQRALVNLLLAEDGDKDILKQQKQVLTEFAKAVVGLKTKLNVALGTEVDSSEATAWNFSLGQLDDKWAGIESAMTDEGTEILDQIRDLYRARLLNGIVPAGKTLSHAKVDD

SEQ ID NO: 478 - protein, 1361 aa, Lactobacillus casei
MTKLGKPYGIGVDIGSNSIGFAAVDENSHLIRLKGKTVIGARLFEEGKAAADRRASRTTRRRLSRNRWRLSFLRDFFESHITPTGPNFFMRQKYSEISPKDKARYKYEKRLFNDRTDAEFYQQYPTMYHLRNRLLTDPSKADVREIYFAIHHILKSRGHFLTSGYAKDFNTNKVALNEIFPALQDAYAQVYPDLDITFDENKVNEFKTVLLNEKATPSDTQRALVNLLLAEDGDKDILKQQKQVLTEFAKAVVGLKTKLNVALGTEVDSSEATVWNFSLGQLDDKWAGIESAMTDEGTEILDQIRDLYRARLLNGIVPAGNTLSQAKVDDYAQHHEDLELFKDYLKQLEDDGTAKAIRQLYDRYIDGDDAKPFVREDFVKALTKEVTAHPNAKSPELLERLAQPDFMLKQRNKANGAIPVQMQQRELDQIIKNQSVYYDWLAAPNPVEKHRKSMPYQLDELLNFRIPYYVGPLVTAKEQKAAQGGVFAWMVRKDPDGNITPYNFDEKVDREASANTFIQRMKTTDTYLIGEDVLPKQSLLYQRYEVLNELNNVRVNNEKLSIEQKQQVIRELFERHNSVTIKQFAENLRAHGDYAHIPEIRGLADEKRFLSSLSTYRQLKSLLPDAIDDPAKQADIENIIAWSTVFEDAAIFKTKLKEINWLDSQTITKLSNIRYRGWGQFSHKFLNGLTLGNGHTIIQELFLSNNNLMQILTDETLQKKMTELNADKLKAANINDAIDDAYTSPSNKKALRQVLRVIEDIKRAADGQDPSWLYVETADGGGTPGKRTRARQHQLQEIYANAAHELIDSAVRGELEDKIADKADFNDRLVLYFMQGGRDIYTGTPLNIDQLSSYDIDHILPQSLIKDNSLDNRVLVHAIINREKNATFASTIYAQKMNATWRQWHEAGLISGRKLRNLQMRPDQIDKYASGFVARQLVETRQIIKLTEQIVAAQYPETKIIAVKAGLSHQLREELEFPKNRDVNHYHHAFDAFLAARIGTYLLKRFPNLQAFFTYGKFKKADVKKLRGFNFIRDITHAEDKIVVKDTGEVIWDKKRDVDELDRIYNFKRMLITHEVHFEKADLFKQTVYGAKDSKEAGGKKQLISKKKGYPVDIYGGYTQETGSYLSVVRLTKKAMYAVVKVSTRDAAKLAVAKSISEQKENETLNDIIDEKLSKISKNGKITHELFEVVLPRVGQKTLFKNSKYNLFLVNSDTYMHNYQELWMPREYQKMWKDISLSKYGDAQTEDQLDQIFGFIVSQVNSYFNLYDINQFRKKLNDAADKFATLPMRDTDDMQGKIATIGQLLIGLQANAARSDLRNLDIKTPLGLLQIPNGISLDSDTSVVYQSPTGLLEREVHLSDL

SEQ ID NO: 479 - protein, 1128 aa, Lactobacillus casei
MTKLGKPYGIGVDIGSNSIGFAAVDENSHLIRLKGKTVIGARLFEEGKAAAKRRAGRTTRRRLSRNRWRLSFLRDFFESHITPTDPNFFMRQKYSEISPKDKARYKYEKRLFNDRTDAEFYQQYSTMYHLRNRLMTDPSRADVREIYFAIHHILKSRGHFLTPGDAKDFNTNDVALDEIFPALQDAYAQVYPDLGITFDEDKANEFKTILLNEIATSIDTQRALVKLLLAEEDDKDILKQQKQVLTEFAKAVVGLKTKLNLALGTEVDSSEATAWNFSLGQLDDKWAGIESAMTDEGTEILDQIRDLYRARLLNGIVPTGKTLSQAKVDDYTQHHEDLQLFKAYLKQLEDDGTAKAIRQLYDRYIDGDDAAPFLRENFVKALTKDVTAHPNTKSPELLERLAQPDFMLKQRNKANGAIPVQMQQRELDQIIKNQAVYYDWLAAPNPVEKHRKSMPYQLDELLNFRIPYYVGPLVTAKEQKAAQGGVFAWMVRKDPEGNITPYNFDEKVDREASANTFIQRMKTTDTYLIGEDVLPKQSLLYQRYEVLNELNNVRVNNEKLSIEQKQQVIRELFERHNSVTIKQFAENLRAHGDYAHIPEIRGLADEKRFLSSLSTYRQLKSLLPEAIDDPAKQADIENIIAWSTVFEDAAIFKTKLKEISWLGSEAITKLSNIRYRGWGQFSRKFLNGLTLGNGHTIIQELLLSTNNLMQILTDETLQKKMTELNADKLKTANINDAIDNAYTSPSNKKALRQVLRVVDDIKRAADGQDPSWLYVETADGGGTPGKRTRARQHQLQEIYANAAHELIDTAVRGELEDKISDKADFNDRLVLYFMQGGRDIYTGAPLNIDQLSSYDIDHILPQSLIKDNSLDNRVLVHAIINREKNATFASTIYAQKMNATWRQWHEAGLISGRKLRNLQMRPDQIDKYASGFVARQLVETRQIIKLTEQIVAAQYPDTKIIAVKAGLSHQLREELEFPKNRDVNHYHHAFDAFLAARIGTYLLKRFPNLQAFFTYGKFTKADVKKLRGFNFIRDITHAEDKIVAKDTGEVVWDKQRDVDELDRIYNFKRMLITHEVRFETADLFKQTVYGARDSKEAGGSKQLIPKKKDIQLIFMGAISERTRPILPL

SEQ ID NO: 480 - protein, 1366 aa, Lactobacillus casei
MTKLGKPYGIGVDIGSNSIGFAAVDENSHLIRLKGKTVIGARLFEEGKAAAYRRASRTTRRRLSRNRWRLSFLRDFFESHITPTDPNFFMRQKYSEISPKDKARYKYEKRLFNDRTDAEFYQQYPTMYHLRTRLLTDPSKADVREIYFAIHHILKSRGHFLTPGYAKDFNTNKVALNEIFPALQDAYAQVYPDLDITFDENKVNEFKTVLLNEKATPSDTQRALVNLLLAKEGDRDILKQQKQVLTEFAKAVVGLKTKLNVALGTEVDSSEATAWNFSLGQLDDKWAGIESAMTDEGTEILDQIRDLYRARLLNGIVPAGKTLSQAKVDDYAQHHEDLELFKDYLKQLEDDGTAKAIRQLYDRYIDGDDAKPFVREDFVKALTKEVTAHPNAKSPELLERLAQPDFMLKQRNKANGAIPVQMQQRELDQIIKNQAVYYDWLAAPNPVEKHRQSMTYQLDELLNFRIPYYVGPLVTAKEQKAAQGGVFAWMVRKDPDGNITPYNFDEKVDREASANTFIQRMKTTDTYLIGEDVLPKQSLLYQSYEVLNELNNVRVNDNKLSFDQKQQVLGELFERHNTVTIKQFVDNLLAHGDYDRIPEVRGLADEKRFLSSLSTYNQLKGILHEAIDDADKQTDIENIIAWSTIFEDKAIFKTKLNEISWLNAGMINSLANIRYRGWGQFSHKLLNELTLSTGRTVFEELLISSRNLMQILTDEVLKQKIAELNAHELKASGIYAAIDDAYTSPSNKKALRQVLSVIDDITNAAGQAPNWLYIETADGDGVPGKRTNSRQRKIQEIYANAAQELITGSVRGEFEDKIASRADFTDRLVLYFMQGGRDIYTGEPLNIDNLSSYDIDHILPQSLIKDNSLDNRVLVHPLVNREKDTIFASTRFAKQMNGMWRQWHAAGLISSRKLRNLQMRPDEIDKYASGFVARQLVETRQIIKLTEQIVADQYPDTKIIAVKAGLSSQLRKELDFPKNREVNHYHHAFDAFLAARIGTYLLKRYPNLEPFFTYGKFKKTEVKKLKSLKSLKSFNFIRDMTHAKDKIVAKETGEIVWDNASDINELDRIYNFKRMLITHEVRFETASLFKQTLYAAKNSKNRGGSRQLIPKKKGYLVDIYGGYTQETGSYLSVVRLTKKAMYAVVKVSTRDAAKLAVAKSISEQKENETLKKIIDGKLSKTSKKGKTTHQLFEIVLPRVGQKTLFKNSKYNQFLVNSDTYMHNYQELWMPREYQRMWKDILLSNHGDAQIEGQLDQIFKFIVSQVNSYFNLYDINQFRKKIADATDKFAKLPTHDTDNARGKIATIGQLLIGLQANAMRSDLRNLDIKTPFGLLQIGTGITLDLDTSIIYQSPTGLFEREVPLTDL

SEQ ID NO: 481 - protein, 1354 aa, Lactobacillus coryniformis
MTLHYNVGLDIGTNSVGYTIVDDNGKILQVKGKNGYGVRVFKEGATAAERRIFRTTHRRLKRRKWRLRLLQDFFEPYILPQDDGFFIRRKESNLVLNDRDEDTASLFNDRSDRDFYQAYPTIYHLRQALMTEKRQFDVREIYLAMHHIIKYRGHFLLNGTVNNFTNNKIDLHSDFEELNALLLNVIPELKFQIDLDHSTMFQTTLLNTTISRSGRQRDLVKSFYNGSDDKQLAKQQKSVATELLKAILGLKAKFHKLFNLDLLETTEWEFSFDAEDIDDKLAKLEPLMTENQQQVMDILQRIFAAITLNGIVPEGKTLSASKVDSYQKHKQDLKLLKAIAQHSDKKTATVLQTAYNEYINGIASKPLKQEDFYKRLTNAVKKSSDPQVADMLALIDQEKFLPKQRTKENGAIPHQLHQLELERIIDNQKDYYPWLAELNPNQARQKVAKYKLSELVAFRVPYYVGPLIEPEVQQATSNAHFAWMARKEAGPITPWNFDQKVDRNVSAERFIKRMTTKDTYLLAEDVLPLHSLLYQRFIVLNELNNVRVNGQKLTKKQKQAVYQDLFKRQPHVTKKQFKSYLVQTGEFAESSKIEGLANETSFNSGLTTENELRKIFGAQLDEARYQVDFEQIIEWATLFEDAKILRTKLAEITWLTTEQIEKLAGIRYRGWGRFSRKLLAGLRDQNGQQIIDLLWDTPNNFMVIVSQAAFSEAITKENEKLIDRRGAQDVITDLYTSPQNKKALRQVLAIVADVQKAMGGVPPQRIFIEFAREDEKNPRRSVERSRQLEKLYQTISNEFLINSEVRQELKEAVDQKVNFKDRLFLYFLQGGVDLYSGKRINIDQLSHYDIDHILPQSFIKDDSLDNRVLVSQKLNRSKSDSVPLSEFANYKFGPAMQAKWLQLKEAGLLSKRKYDNLTLDPTKLSKFAPLGFVNRQLVETRQVIKLAANLLASEETKVVTIKANMTHQVRKELDFPKNRNVNNYHHAFDAYLTAFVGIFLSKRYPKLKPYFTYGDFQKGNKLPDLKNFNFLYELKNKDRSIDSNTGEIIWDKQRDLAYMNKIYNFKKVTVVHEVLTKSGALYNQTLYKASEDKASGRGTKQLIRKKDNMPTELYGGYTGSTSAFMSIVRLWKKDKPYYKVVGIPTRMAAKLANQAQLLDYLTKKFTTRKLVKKTGDYKTTVERFELVVPKVGFNQLVIDGGQPFMLGSATYQYNARELFISKEAVKALNKQLSTHVDLVQVFDEILVQVNRWFPLYDTNGFREKLSHGRDRFMKLNDSFEEKSDTQIDVLNRILIGFHANAARTNLKILGLGTDLGFMTQQAGIRLTEKAILVHQSPSGLFERKVALRDLKGLR

SEQ ID NO: 482 - protein, 544 aa, Lactobacillus crispatus
KYYLYFMQLGRDAYTGKPINIDEVSQYYDIDHILPQSFIKDDSLNNRVLVAKPINNGKSDGVPLKLFGDNLATGLGITVKQMWNNWADKGLINKAKQNNLFLDPENINKHQASGFIRKQLVETSQIIKLATTILQAEYPKTKIIVVKASSNHYLRNEFDLYKSREVNDYHHAIDAYLTTICGNLLYQAYPKLRPFFVYGQFKKFSSDPKKENEILKKTKNFDFVAKLLGSKAPNEIRSQQGKVLFEKNKIRLQLNKAYNYKYMLVSRDTTTKNQEMFGMTIYPRAERDIAKSRKLIEKRKGFSTDIYGGYTGTAAAYMAIVRINKTKSSQYKVIAVPMTKRAILNKAEKEGNYEKILKQILSPSILYNDKGKRKAGVISFDIIKGKVPYNQVVQDGNKKFLLKSAIYLCNAKQLVLSEEAMRVITGHWLDSDKQDQELLDVYDEILEKIDRYLPLFDIRDFRNKLHKGREKFLKLNAEDKFKAIIQILKGLHDNSDTGELKDIGITVPFGQLQNNSGITLSSDTILVYQSPTGLFEKRVKISSL

SEQ ID NO: 483 - protein, 298 aa, Lactobacillus crispatus
MDELNKISVNGKKLSVSVKQELYEDLFKKNNTVSAKQLKNWLIENQKLPYIKIKGLADQTKFNSSLSTYIKLKKSGLFVDKLDSNEFRDDFEKIIEWSTIFEDKQIYIQKLQTIDWLTAKQIQFLQNIRLQGWGRLSKKLLTAIVDSNGQNIIEQLWNSQQIFMSIVNKADIKGTITDANQDLMHSNSMEDILSEAYTSPANKKMIRQVVKVVHDIQKAASGQAPKQIAIEFARESRRNSKLSQTRGHKLQDIYQKISGDIVNKNLKDKLAEYIKNNQLSVWEKTSFQMNKNDQDFLF

SEQ ID NO: 484 - protein, 279 aa, Lactobacillus crispatus
MNGKKLSVSVKQELYEDLFKKNNTVSAKQLKNWLIENQKLPYIKIKGLADQTKFNSSLSTYIKLKKSGLFVDKLDSNEFRDDFEKIIEWSTIFEDKQIYIQKLQTIDWLTAKQIQFLQNIRLQGWGRLSKKLLTAIVDSNGQNIIEQLWNSQQIFMSIVNKADIKGTITDANQDLMHSNSMEDILSEAYTSPANKKMIRQVVKVVHDIQKAASGQAPKQIAIEFARESRRNSKLSQTRGHKLQDIYQKISGDIVNKNLKDKLAEYIKNNQLNKDKYYTR

SEQ ID NO: 485 - protein, 538 aa, Lactobacillus crispatus
MQLGRDAYTGKPINIDEVSQYYDIDHILPQSFIKDDSLNNRVLVAKPINNGKSDGVPLKLFGDNLATGLGITVKQMWNNWADKGLINKAKQNNLFLDPENINKHQASGFIRKQLVETSQIIKLATTILQAEYPKTKIIVVKASSNHYLRNEFDLYKSREVNDYHHAIDAYLTTICGNLLYQAYPKLRPFFVYGQFKKFSSDPKKENEILKKTKNFDFVAKLLGSKAPNEIRSQQGKVLFEKNKIRLQLNKAYNYKYMLVSRDTTTKNQEMFGMTIYPRAERDIAKSRKLIEKRKGFSTDIYGGYTGTAAAYMAIVRINKTKSSQYKVIAVPMTKRAILNKAEKEGNYEKILKQILSPSILYNDKGKRKAGVISFDIIKGKVPYNQVVQDGNKKFLLKSAIYLCNAKQLVLSEEAMRVITGHWLDSDKQDQELLDVYDEILEKIDRYLPLFDIRDFRNKLHKGREKFLKLNAEDKFKAIIQILKGLHDNSDTGELKDIGITVPFGQLQNNSGITLSSDTILVYQSPTGLFEKRVKISSL

SEQ ID NO: 486 - protein, 206 aa, Lactobacillus crispatus
MQLGRDAYTGKPINIDEVSQYYDIDHILPQSFIKDDSLNNRVLVAKPINNGKSDGVPLKLFGDNLATGLGITVKQMWNNWADKGLINKAKQNNLFLDPENINKHQASGFIRKQLVETSQIIKLATTILQAEYPKTKIIVVKASSNHYLRNEFDLYKSREVNDYHHAIDAYLTTICGNLLYQAYPKLRPFFVYGQFKKFSSDPKKRK

SEQ ID NO: 487 - protein, 857 aa, Lactobacillus crispatus
MTKLNNEYMVGLDIGTNSCGWVATDFDNNILKMHGKRALGSHLFDEGVSAADRRAFRTTRRRIKRRKWRLKLLEEIFDEEMAKVDPNFFARLKESGLSPLDTRKNVSSIVFPTKKMDKQFYKKFPTIYHLRNALMKQDKKFDLRAIYIAIHHIVKYRGNFLSNSSISNFSASKIEIDRFVNELNDLYSIFLPESGVIFDAGNASKVEDIIRNEQMFKLDKIKEIADVLPDTENKSGLKLSKKISKEISKAILGYKAKFEIILQVNVDKTDSSIWNFKLNDENADVNLSEITSDLTDTQLQILDLVRNLFSAISLLNIVDEGSTLSESMIRKYNDHAQDLKLLKTVIKNHSDRKKAHNLQLAYDKYVNNRHFVDVETKKAFPNKHLYRKSDFYEIVKKNLDASKEAVQIRKEIALDKFMPKQRSDENGVIPFQLNQIELDKIIENQGKYYPFLKEINPIKAHRMQAPYKLDELIRFRVPYYVGPMIEPTNSSYPQTRQNQSFAWMVRKAKGRITPWNFDEKVDRQKSANNFIKRLTTKDTYLFGEDVLPANSLLYQKYTVLDELNKISVNGKKLSVSVKQELYEDLFKKNNTVSAKQLKNWLIENQKLPYIKIKGLADQTKFNSSLSTYIKLKKSGLFVDKLDSNEFRDDFEKIIEWSTIFEDKQIYIQKLQTIDWLTAKQIQFLQNIRLQGWGRLSKKLLTAIVDSNGQNIIEQLWNSQQIFMSIVNKADIKGTITDANQDLMHSNSMEDILSEAYTSPANKKMIRQVVKVVHDIQKAASGQAPKQIAIEFARESRRNSKLSQTRGHKLQDIYQKISGDIVNKNLKDKLAEYIKNNQLSVWEKTSFQMNKNDQDFLF

SEQ ID NO: 488 - protein, 857 aa, Lactobacillus crispatus
MTKLNNEYMVGLDIGTNSCGWVATDFDNNILKMHGKRALGSHLFDEGVSAADRRAFRTTRRRIKRRKWRLKLLEEIFDEEMAKVDPNFFARLKESGLSPLDTRKNVSSIVFPTKKMDKQFYKKFPTIYHLRNALMKQDKKFDLRAIYIAIHHIVKYRGNFLSNSSISNFSASKIEIDRFVNELNDLYSIFLPESGVIFDAGNASKVEDIIRNEQMFKLDKIKEIADVLPDTENKSGLKLSKKISKEISKAILGYKAKFEIILQVNVDKTDSSIWNFKLNDENADVNLSEITSDLTDTQLQILDLVRNLFSAISLLNIVDEGSTLSESMIRKYNDHAQDLKLLKTVIKNHSDRKKAHNLQLAYDKYVNNRHFVDVETKKAFPNKHLYRKSDFYEIVKKNLDASKEAVQIRKEIALDKFMPKQRSDENGVIPFQLNQIELDKIIENQGKYYPFLKEINPIKAHRMQAPYKLDELIRFRVPYYVGPMIEPTNSSYPQTRQNQSFAWMVRKAKGRITPWNFDEKVDRQKSANNFIKRLTTKDTYLFGEDVLPANSLLYQKYTVLDELNKISVNGKKLSVSVKQELYEDLFKKNNTVSAKQLKNWLIENQKLPYIKIKGLADQTKFNSSLSTYIKLKKSGLFVDKLDSNEFRDDFEKIIEWSTIFEDKQIYIQKLQTIDWLTAKQIQFLQNIRLQGWGRLSKKLLTAIVDSNGQNIIEQLWNSQQIFMSIVNKADIKGTITDANQDLMHSNSMEDILSEAYTSPANKKMIRQVVKVVHDIQKAASGQAPKQIAIEFARESRRNSKLSQTRGHKLQDIYQKISGDIVNKNLKDKLAEYIKNNQLSVWEKNSFQMNKNDQDFLF

SEQ ID NO: 489 - protein, 347 aa, Lactobacillus crispatus
MVNLKSLVLILKKENEILKKTKNFDFVAKLLGSKAPNEIRSQQGKVLFEKNKIRLQLNKAYNYKYMLVSRDTTTKNQEMFGMTIYPRAERDIAKSRKLIEKRKGFSTDIYGGYTGTAAAYMAIVRINKTKSSQYKVIAVPMTKRAILNKAEKEGNYEKILKQILSPSILYNDKGKRKAGVISFDIIKGKVPYNQVVQDGNKKFLLKSAIYLCNAKQLVLSEEAMRVITGHWLDSDKQDQELLDVYDEILEKIDRYLPLFDIRDFRNKLHKGREKFLKLNAEDKFKAIIQILKGLHDNSDTGELKDIGITVPFGQLQNNSGITLSSDTILVYQSPTGLFEKRVKISSL

SEQ ID NO: 490 - protein, 534 aa, Lactobacillus crispatus
RDAYTDKPINIDEVSQYYDIDHILPQSFIKDDSLNNRVLVAKPINNGKSDGVPLKLFGDNLATGLGITVKQMWNNWADKGLINKAKQNNLFLDPENINKHQASGFIRKQLVETSQIIKLATTILQAEYPKTKIIVVKASSNHYLRNEFDLYKSREVNDYHHAIDAYLTTICGNLLYQAYPKLRPFFVYGQFKKFSSDPKKENEILKKTKNFDFVAKLLGSKAPNEIRSQQGKVLFEKNKIRLQLNKAYNYKYMLVSRDTTTKNQEMFGMTIYPRAERDIAKSRKLIEKRKGFSTDIYGGYTGTAAAYMAIVRINKTKSSQYKVIAVPMTKRAILNKAEKEGNYEKILKQILSPSILYNDKGKRKAGVISFDIIKGKVPYNQVVQDGNKKFLLKSAIYLCNAKQLVLSEEAMRVITGHWLDSDKQDQELLDVYDEILEKIDRYLPLFDIRDFRNKLHKGREKFLKLNAEDKFKAIIQILKGLHDNSDTGELKDIGITVPFGQLQNNSGITLSSDTILVYQSPTGLFEKRVKISSL

SEQ ID NO: 491 - protein, 278 aa, Lactobacillus crispatus
SVNGKKLSVSVKQELYEDLFKKNNTVSAKQLKNWLIENQKLPYIKIKGLADQTKFNSSLSTYIKLKKSGLFVDKLDSNEFRDDFEKIIEWSTIFEDKQIYIQKLQTIDWLTAKQIQFLQNIRLQGWGRLSKKLLTAIVDSNGQNIIEQLWNSQQIFMSIVNKADIKGTITDANQDLMHSNSMEDILSEAYTSPANKKMIRQVVKVVHDIQKAASGQAPKQIAIEFARESRRNSKLSQTRGHKLQDIYQKISGDIVNKNLKDKLAEYIKNNQLNKDKYY

SEQ ID NO: 492 - protein, 277 aa, Lactobacillus crispatus
SVNGKKLSVSVKQELYEDLFKKNNTVSAKQLKNWLIENQKLPYIKIKGLADQTKFNSSLSTYIKLKKSGLFVDKLDSNEFRDDFEKIIEWSTIFEDKQIYIQKLQTIDWLTAKQIQFLQNIRLQGWGRLSKKLLTAIVDSNGQNIIEQLWNSQQIFMSIVNKADIKGTITDANQDLMHSNSMEDILSEAYTSPANKKMIRQVVKVVHDIQKAASGQAPKQIAIEFARESRRNSKLSQTRGHKLQDIYQKISGDIVNKNLKDKLAEYIKNNQLNKDKY

SEQ ID NO: 493 - protein, 1368 aa, Lactobacillus curvatus
MSRPYNIGLDIGTSSIGWSVVDDQSKLVSVRGKYGYGVRLYDEGQTAAERRSFRTTRRRLKRRKWRLGLLREIFEPYITPIDDTFFLRQKQSNLSPKDQRKLYTQTSLFNDRTDRAFYDDYPTIYHLRYRLMTEKRQFDIREIYLAMHHIVKYRGHFLNEAPVSSFKSSEINLVAHFDRLNTIFADLFSESGFQLETDKLAEVKALLLDNQQSASNRQRQALSLIYTPSTNKAVEKQNKAIATELLKAILGLKAKFNVLTGIEAEDVKAWTLTFNAENFDEEMVKLESSLDDNAHQIIESLQELYSGVLLAGIVPENQSLSQAMITKYDDHQKHLKMLKAVREALAPGDRQRLKQAYDQYVDGQENTKAYSKEDFYGDITKALKNNPDHPIVSEIKKLIELDQFMPKQRTKDNGAIPHQLHQQELDRIIENQQQYYPWLAELNPNSKRQTVAKYKLDELVAFRVPYYVGPLITAEQQRQSSDAKFAWLIRKAEGRITPWNFDDKVDRQASANEFIKRMTTTDTYLLAEDVLPKQSLIYQRFEVLNELNGLKIDDQPITTELKQAIFTDLFMQKISVTVKNIQDYLVSEKRYASRPAITGLSDENKFNSRLSTYHDLKMIVGDAVDDVDKQADLEKCIEWSTIFEDGKIYSAKLNEIDWLTDQQRVQLAAKRYRGWGRLSAKLLTQIVNANGQRIMDLLWDTTDNFMRIVHSEDFDKLITEANQMMLAENDVQDVINDLYTSPQNKKALRQILLVVNDIQKAMKGQAPERILIEFAREDEVNSRLSVQRKRQVEQVYQNISNELLNNTEIRNELKDLSNSALSNTRLFLYFMQGGRDMYTGDSLNIDRLSTYDIDHILPQSFIKDNSLDNRVLVSQKMNRSKADQVPTDFTSVELGQKMQIQWEQMLRAGLITKKKYDNLTLNPDHISKYAMKGFINRQLVETRQVIKLATNLLMEQYGEDNIELITVKSGLTHQMRTEFDFPKNRNLNNHHHAFDAYLTAFVGLYLLKRYPKLKPYFVYGEYQKASQQDKWRNFNFLNGLKKDELVDENTEAVIWDKESGLAYLNKIYQFKKILVTRGVHENSGALFNQTLYAAKDDKASGQGGKQLIPAKQDRSTALYGGYSGKTVAYMCIVRIKNKKGDLYKVCGVETSWLAQLKQLTDEDSQKAFLEQKISPQFTKVKKQKGNIIEAVEEFEVIAPHILINQRFFDNGQELTLGSATYKHNEQELILDKTAVKLLNGALPLTQSEELAEQVYDEILDQVMHYFPLYDTNQFRAKLSTGKAAFMKLPWKSQWDGNKMVQVGQQVILDRILIGLHANAAMSDLKVLKMTTPFGMIQQSTGITLSADTQIIYQSPTGLFERRVALRDL

SEQ ID NO: 494 - protein, 669 aa, Lactobacillus delbrueckii
MAKPKDYTIGLDIGTNSVGWVVTDDQNNILRIKGKKAIGARLFTEGKVAAERRSFRTTRRRLSRRRWRIKMLEELFDEEIAKVDPSFFARLHESWISPKDKRKRYSAIVFPSPEEDKKFHESYPTIYHLRDKLMKDDQKHDIREIYIAVHQMIKARGNFLHDESVETYRSGMSSLGGRSERNILSVQTLEELNDLFAENEGTEEVELNVASAEQINDILTGGHLNADSQKEISNLLLPSSFPSFDDKAKEKQVKKLINNVATNISKAWLGYKADFSTILNLAKVDKDQKKIFAFALQGGDEEDKVQELESLLEQSQTDIVDRLIEIRHAIVLSEIVPVGMTLSEAMIDKYDQHKEDLITLKAVIRNTKDKKKAAKLQAIYDLYVKKRHADLAKAMKLTGIKKRSELLDPEELKKGISSLLDDSPEAVEIKQRLEEKTFLPLQRSNNNGVIPNQLHQVELDEIIKKQSKYYPFLAEKNPDESEEAQKKAPTKLDALLTFRVPYYVGPMITKEEQEAQNGHSFAWMVRRDPQDHEAITPWNFEKKVDKMASATQFIKRMTTKDTYLLGEDVLPASSLKYQLFTVLNELNNLRVNGKKLTSDEKEQVIEGLFKKQKTVKADKFVKYWQAKHIGADIKVKGLSDPSKFNSTMSTYIDFKKIFGDQLNDVNRQR

SEQ ID NO: 495 - protein, 544 aa, Lactobacillus delbrueckii
MTGCADYDVDHIMPQSFVKDDSLDNRVLVARAVNNQKSDKVPALLFGNKVVADLGITVREMWDKWQKLGMISKRKLSNLLTDPDALTEYRAQGFIRRQLVETSQVIKLTATILQSEFPDSKIIEVPAKYNSIVRKQFDLYKSREVNDFHHAIDAYLSTIVGNYLYQVYPNLRRMFVYGEFKKFSSNAEESAHDVARRVKSMNFLDDLLRGTHGDNIYCRSTGEIVFNRNDIISKLKQAYSFKQMLVTQEVFTKKSALFDQTVYPSPERDSKKRSGLIPRKKGMDTEIYGGYSGNKDAYFVLAEAVKEKGHTLQIVGVPIRALNTLKNSANYSEKLLEIIKPQVMFNKDTGKPIKGIKDVKILMDKIPCRQPVLEGESYYMLASSKYRYSLKQISLSQMSMKYILDYIDDPNFNKHEMINIDQQDEKECLLSVYDEILEKMDKYLPLFDIRSFRKKLHDGRDAFIALPVASEEKKPGEVDVIRKILKGLHANADITNLAELGFGTAALGALVSTGGIKISDDAVFIYQSPTGLFERRVKVSDLLK

SEQ ID NO: 496 - protein, 1356 aa, Lactobacillus farciminis
MTKKEQPYNIGLDIGTSSVGWAVTNDNYDLLNIKKKNLWGVRLFEEAQTAKETRLNRSTRRRYRRRKNRINWLNEIFSEELAKTDPSFLIRLQNSWVSKKDPDRKRDKYNLFIDGPYTDKEYYREFPTIFHLRKELILNKDKADIRLIYLALHNILKYRGNFTYEHQKFNISNLNNNLSKELIELNQQLIKYDISFPDDCDWNHISDILIGRGNATQKSSNILKDFTLDKETKKLLKEVINLILGNVAHLNTIFKTSLTKDEEKLNFSGKDIESKLDDLDSILDDDQFTVLDAANRIYSTITLNEILNGESYFSMAKVNQYENHAIDLCKLRDMWHTTKNEEAVEQSRQAYDDYINKPKYGTKELYTSLKKFLKVALPTNLAKEAEEKISKGTYLVKPRNSENGVVPYQLNKIEMEKIIDNQSQYYPFLKENKEKLLSILSFRIPYYVGPLQSAEKNPFAWMERKSNGHARPWNFDEIVDREKSSNKFIRRMTVTDSYLVGEPVLPKNSLIYQRYEVLNELNNIRITENLKTNPIGSRLTVETKQRIYNELFKKYKKVTVKKLTKWLIAQGYYKNPILIGLSQKDEFNSTLTTYLDMKKIFGSSFMEDNKNYDQIEELIEWLTIFEDKQILNEKLHSSKYSYTPDQIKKISNMRYKGWGRLSKKILMDITTETNTPQLLQLSNYSILDLMWATNNNFISIMSNDKYDFKNYIENHNLNKNEDQNISDLVNDIHVSPALKRGITQSIKIVQEIVKFMGHAPKHIFIEVTRETKKSEITTSREKRIKRLQSKLLNKANDFKPQLREYLVPNKKIQEELKKHKNDLSSERIMLYFLQNGKSLYSEESLNINKLSDYQVDHILPRTYIPDDSLENKALVLAKENQRKADDLLLNSNVIDRNLERWTYMLNNNMIGLKKFKNLTRRVITDKDKLGFIHRQLVQTSQMVKGVANILDNMYKNQGTTCIQARANLSTAFRKALSGQDDTYHFKHPELVKNRNVNDFHHAQDAYLASFLGTYRLRRFPTNEMLLMNGEYNKFYGQVKELYSKKKKLPDSRKNGFIISPLVNGTTQYDRNTGEIIWNVGFRDKILKIFNYHQCNVTRKTEIKTGQFYDQTIYSPKNPKYKKLIAQKKDMDPNIYGGFSGDNKSSITIVKIDNNKIKPVAIPIRLINDLKDKKTLQNWLEENVKHKKSIQIIKNNVPIGQIIYSKKVGLLSLNSDREVANRQQLILPPEHSALLRLLQIPDEDLDQILAFYDKNILVEILQELITKMKKFYPFYKGEREFLIANIENFNQATTSEKVNSLEELITLLHANSTSAHLIFNNIEKKAFGRKTHGLTLNNTDFIYQSVTGLYETRIHIE

SEQ ID NO: 497 - protein, 1313 aa, Lactobacillus fermentum
MHYLDEIFAPHLQEVDENFLRRLKQSNIHPEDPAKNQAFIGKLLFPDLLKKNERGYPTLIKMRDELPVEQRAHYPVTNIYKLREAMINEDRQFDLREVYLAVHHIMKYRGHFLNNASVDKFKVGRIDFYKSFNVLNEAYEELQNGEGSFTIEPSKVEKIGQLLLDTKMRKLNRQKAVAKLLEVKVADKEETKRNKQIATAMSKLVLGYKADFATVAMANGNEWKIDLSSETSEDEIEKFREELSDAQNDILTEITSLFSQIMLNEIVPNGMSISESMMDRYWTHERQLAEVKEYLATQPASARKEFDQVYNKYIGQAPKERGFDLEKGLKKILSKKENWKEIDELLKAGDFLPKQRTSANGVIPHQMHQQELDRIIEKQAKYYPWLATENPATGERDRHQAKYELDQLVSFRIPYYVGPLVTPEVQKATSGAKFAWAKRKEDGEITPWNLWDKIDRAESAEAFIKRMTVKDTYLLNEDVLPANSLLYQKYNVLNELNNVRVNGRRLSVGIKQDIYTELFKKKKTVKVSDVASLVMAKTRGVNKPSVEGLSDPKKFNSNLATYLDLKSIVGDKVDDNRYQTDLENIIEWRSVFEDGEIFADKLTEVEWLTDQQRSALVKKRYKGWGRLSKKLLTGIVDENGQRIIDLMWNTDQNFMQIVNQPVFKEQIDQLNQKAITNDGMTLREWVESVLDGAYTSPQNKKAIWQVVRVVEDIVKAVGNAPKSISIEFARNEGNKGEITRSRRTQLQKLFEDQAHELVKDTSLTEELEKAPDLSDRYYLYFTQGGKDMYTGDPINFDEISTKYDIDHILPQSFVKDDSLDNRVLVSRAENNKKSDRVPAKLYAAKMKPYWNQLLKQGLITQRKFENLTMDVDQNIKYRSLGFVKRQLVETRQVIKLTANILGSMYQEAGTDIIETRAGLTKQLREEFDLPKVREVNDYHHAVDAYLTTFAGQYLNRRYPKLRSFFVYGEYMKFKHGSDLKLRNFNFFHELMEGDKSQGKVVDQQTGELITTRDEVAKSFDRLLNMKYMLVSKEVHDRSDQLYGATIVTAKESGKLTSPIEIKKKRPVDLYGAYTNGTSAFMTIIKFTGNKPKYKVIGVPTTSAVGLKRVGKPGSESYNQELHRIIKSNPKVKKDFEIVVPHVSYSQLIVDDDCKFTLASDTYQHPATQLVLSKESMEIIADDFKFVKENTATADEQLVRVFDEIVNQMNHYFTIFDQRSNRQKVTKARDKFVSLPTESEYEGAKKTQVGKTEVITNLLMGLHANSAQGDLKVLGLSTFGFFQSSGGLNLSEDAMIVYQSPTGLFERRICLKDI

SEQ ID NO: 498 - protein, 1327 aa, Lactobacillus florum
MTEQQQPYNIGLDIGTSSIGWAVTDQNDKLLHIRGHNGIGVRLFKEGESAAERRGFRTTRRRLSRRRWRLRFLDRIFDAELAKVDPNFLARLKQSNISPLDPNKQMFGNILFDDPQFDDQKFHQQYPTIYHLRSALAQPDAPQADVRLIYLALHHMIKFRGHFLNGAAVEKFHGGQLHLESEFQELNQIFSNQQRDHVQLQTSSLDEVATILKDNQRTPSDRQRELSARLFVPVDKTIDKENKKLATELLKAVLGLKAKFDVILGVEATDPQAFKLQFSSDDFDDKIAELASELTDEANEILTVLQRLYFSLNLADILTNRQTKQVADSISTAMINRYDDHKHHLKMLKELEAQVTQEQRDGLKKAYDEYIDGDKPTIDTFYTNIKKNLDDSELANQIKSLIDLQAFMPKQRSKENGSIPHQLHQRELDQLIEVQGKYYPWLLAAKDKLDALIAFRVPYYVGPMIDPNQSDDPQNTKFAWMVRKEAGEITPWNFEEKVDKTSSATNFIKRMTTTDTYLLGEPVLPKNSLLYQQFTVLNELNKLKVNGKALTVDQKKYLYEHVCKKQRRVTLKKLSDCLMARGDFPMGAIFTGTTDQKNMNNTLKTYQDFQEIFGDEIDNPDRQVDFEKMIEWSAIFEDREIFKLKLAELNWLTSEQLERVSKKRYQGWGRLSQKLLTHIVNENGERIIDQLWNTNQNFMEIMGQDSVKQAIQEHNGANVAQTGINETIDELYTSPQNKKAIRQILLVVDDIKKAVGYAPANIMMEFAREDRDDHRLIASRARQLEKTYQEISKNWFDNESVTQELKDQIKNKTKFTDRLYLYFIQGGIDLYTGHPLNIDQLSSYDIDHILPQSFLLDNSLNNRVLTSQAENRVHKEDRLPGETVANKMRPTWKMMREQGLMTQRKYNNLTLKPDQISKFNNRGQFINRQLVETRQVIKLAADIMSQKYQADQTKVVTVKANLTHHMREKFNFYKSRNVNDYHHAFDAYLTLFVGNWLLKEYPKLQPYFVYGDFAKTGTNNLKSFNFLYRFERDHKLNDKGAIDTDKDQQLGYMKRIYRFKKMLVTKQLETNEGALYGQTLYPAPKNDKKTRNLINSKKNRPSDIYGGYSNENGSFLTLVKLKKGSKYDYRLVAVPVSKISEIKESELATIEKAIAPQFLKSSGKYRDFQVVLSKILINQKVIDDGMIFTIGSKSYKHNAKQVVLSDNSIQIVSTLSRISDKEKLITVFDEIVDITSKYLPWYKVNDVEKTKMLFRQMQDIDEMKKIIDNSLIGLHCNASITDLGKVGLSKYWGRFVLTAGISLTVDAQLIYQSPTGLFEHRVKVSDL

SEQ ID NO: 499 - protein, 1386 aa, Lactobacillus hominis
MTKITEDYIVGLDIGTNSCGWVAMDSKNTILRMHGKTAIGSHLFDAGNSAADRRAFRTTRRRIKRRKWRLKLLEEIFDSHLAKVDPYFFARLKESGLSPLDTRKNVSSIIYPTSLEDKKFYVDNPTIYHLRYKLMTEDRKFDLREVYLAIHHIVKYRGNFLYNTPVKAFEASKIDVKGSLKKLNELYEGLDSEFNVELDSNNALEIENIIRDKKIFKINKVKEINQLLSLKTEDKERTKLMKDVSKQIVNAILGYKTKFETILLKDVSKDEADDWEFKLTDVDADNKFENLIGDLNENEQEILLVIRKLANAITLSNIVEEGKTLSESMKDKYKKHSDDLKLLKQVISDHPDRDKAKKLALAYDLYVNNRHGKILQAKDILEKKKTLSKEDFYKEIKKNLDDSKESQEILDAISLDSFMPKQRTNENGVIPYQLHQLELDKIIENQGKYYPFLKEVNPVSSHLKQAPYKLDELIRFRVPYYVGPLISPNESTKNKQTKKNQNFAWMIRKEQGQITPWNFDQKVDRMASANKFIKRMTTIDTYLLGEDVLPANSLLYQKFTVLNELNNVKINGKRISVPLKQELYNNLFKKNSTVTTNKLKSYLKENYKLIKVEIKGLSDEKKFNSGLTTYNKLKNLKIFDQQIDDPNYNKDFERIIEWSTIFEDKAIYKEKLKTIDWLSDRQIDKLSKIRMQGWGQLSKKLLSQLTDNNGQTIIEQLWDSQNNFMQIVNQADFKDAIAVANQNLLVDTSVEDILNEAYTSPANKKAIRQVVKVVDDIVKATSGKVPKQIAIEFTRDADDNAKISQSRANKLRKVYKEMSNELASETIRNELERVAKDQKLLKDKHYLYFMQLGRDAYTGELIDIDNLEQYDIDHVLPQSFIKDDSLENRVLVKKAVNNGKSDNVPVKLYGNRMATDLGMTIRHMWEKWKEQGLITKTKYNNLIIDPDKINKYESSGFIHRQLVETSQIIKLVSTILQSKYPDTEIIVVKARYNHYLRKRLNLYKSREVNDYHHAIDAYLSAICGNLLYQVYPYLRPFFVYGQYKKFSSEPEKEKIIYDKTRRYNFISQIFENKDNDIISRETKKKVFDKKDIIEKLKRAYNYKYMLVSRETETHDQEMFKMTVYPRLSRDTKKSRNLIPKKKDMPTEIYGGYTNNSDAYMIIARINKKKGPEYRVFGVPMRELVNLRKAEKNGHYKAYLKQVLEPEIMYSKNGKKNKTISSFEIVKAKVPYKQVILDGDKKFMLASSTYVQNAKQLTLSQYSMQAITDNCENDTEEEKALVEAYDEILTNIDKYLPLFDINKFREKLHAGREKFVDLPLAEKKETILQVLNGLHDNAVMPKIKSLGLSTPLGFMQFHTGVSLSENAKLIYQSPTGLFEKRLKISDL

SEQ ID NO: 500 - protein, 270 aa, Lactobacillus iners
MITYLKDNDDITLSFPKDQLINIFKNSNLNSTEKSDQLKPFFGRTNLEKGIIKLLSGGKQDLSNMFRDETLKNSNYKNLKFSDNRFDDERDGYAADLGDRIDLLILLKQIYDASILESMMSQARVSIDGHKYISSAKVCAYEKHKSDLKRLKSLIKKYLPSEYNNIFRKITEKDNYVAYSKSNITNNKREKALKYVKYVDFTKYLTKKLKTIKTQDAEDDQEIFEIKGELEKQSFLPKQRTLDNSIIPYQLHLMELKKYLIINLNIMTFC

SEQ ID NO: 501 - protein, 255 aa, Lactobacillus iners
MITYLKDNDDITLSFPKDQLINIFKNSNLNSTEKSDQLKPFFGRTNLEKGIIKLLSGGKQDLSNMFRDETLKNSNYKNLKFSDNTFDDERDGYAADLGDRINLLILLKQIYDASILESMMSQARVSIDGHKYISSAKVCAYEKHKSDLKRLKSLIKKYLPSEYNNIFRKITEKDNYVAYSKSNITNNKREKALKYVEYVDFTKYLTKKLKTIKTQDAEDDKEIFEIKGELEKQSFLPKQRTLDNSIIPYQLHLME

SEQ ID NO: 502 - protein, 343 aa, Lactobacillus iners
MLAKDDQEGITVKDKIISLLTFRLPYYIGPVNPAVHGKFAWVKRLANGKVTPWNYKEKIDIDASHEEFIKTKLSKCSFLIGCDVLPKNSLLYQKYMVLSELNTIKFNGVNISEKLKDDIYQNLFKNIQKVTKKRLQNYIKEHENIIGDVIVTGIDNAFKQGLVSYLKFKKIIGDKIDDDRYQKVLEKIIRDITLYDECAGKKIKKEYKDSDLFTEDELNKIVKLTFNDWGRLSAELLDQLEGEDTVSGETGKIIEFMQKHNYNLMQLMSKKFTFKYKIDEINKSYYQHDKFNYKSMIDSLYVSPATKRILWQSLKVVHEISKIMKHDPEKIFYRNGTFQRRSS

SEQ ID NO: 503 - protein, 447 aa, Lactobacillus iners
MLYDHKLIGDKKYARLIRSKAFTDDELAGFIARQLVETRQATKETADLLKRLCPKSRIVYAKAQNASIFRQKFDIPKSRTINDLHHAQDAYLNIVVGNIFDTKFTQDPRNFIKNTKDSRNYNLEKIYDYNVERNNYVAWIAPDSKTNGTIANVKCNLSTKDFRVTRPSFYKKGALFNQNLSRKGSNLAPIKEHSPKSNPLKYGGYSGKNNSFFVVVAGKDNKGKDIVKLIPVNTLIYNKMLHCDYKAKQELLTSYVANNFAINNFRIVKDDIKMYSLVKIDGAYYYLVGGTDERIEVKNAMQLLLSKDSIKAVKILEKESKDQFANIKNYKDIDIKLGRTFNEVISKYTNSVFGKSMLISDKYRKDIFKSVDKSILEFNSLNTIAKADNLLKFVTSMRPAGSVDALKMVGLIERIRKSNVISNFNEFKLINQSVTGLFENEEDLLKL

SEQ ID NO: 504 - protein, 667 aa, Lactobacillus iners
MQKHNYNLMQLMSKKFTFKSKIDEINKSYYQHDKFNYKSMIDSLYVSPATKRILWQSLKVVHEISKIMKHDPEKIFIEMARSKEDHPKRKLSRKADLKQVYKDSKKQIISIIGKDKYQDLSNELDNKDDRDLRWDNLYLYYTQLGRSMYSLKPIDISELMNKNLYDQDHIFPKSKKYDDSIENRVLVEKELNVKKSDIYPISDANIIPQKIKGQVESFWKMLYDHKLIGDKKYARLIRSKAFTDDELAGFIARQLVETRQATKETADLLKRLCPKSRIVYAKAQNASIFRQKFDIPKSRTINDLHHAQDAYLNIVVGNIFDTKFTQDPRNFIKNTKDSRNYNLEKIYDYNVERNNYVAWIAPDGETNGTIANVKCNLSTKDFRVTRPSFYKKGALFNQNLSRKGSNLAPIKEHSPKSNPLKYGGYSGKNNSFFVVVAGKDNKGKDIVKLIPVNTLIYNKMLHCDYKAKQELLTSYVANNFAINNFRIVKDDIKMYSLVKIDGAYYYLVGGTDERIEVKNAMQLLLSKDSIKAVKILEKESKDQFANIKNYKDIDIKLGRTFNEVVSKYTNSVFGKSMLISDKYRKDIFKSVEKSILEFNHLDTIGKADNLLKFVTLMRPSGSAHSLKMVGLIERIRKSNVISNFNEFKLINQSVTGLFENEEDLLKL

SEQ ID NO: 505 - protein, 1395 aa, Lactobacillus jensenii; identical to SEQ ID NO: 118

SEQ ID NO: 506 - protein, 1382 aa, Lactobacillus mucosae
MDIGTNSIGWTAIDDHFSLLRVKGKNAIGVRTFKEGETAADRRGFRTARRRLSRRRWRLQFLDEFFAPYLAEVDPNFLARLKQSDISAKDPAKNQEYMGKLLFPDQEAASDGNGYPTLIQMRKAMPAEKAADFPVFNIYQLRYALMNEKRKFDLREIYLAVHHIVKYRGNFLNNTSVDKFKADQIDFNKSFETLNDLFRQVQPIAPFQIDLTKVDELGKLLLDTKQKKLDRQKAVAKLLPLIEDGTDKEIVKAHQQTAREISKLILGYKAKVGLILQNNLDQTLDMSTENSDDQLMQIAEELDDYQMELINQLSLLYSQIMLNEIVPNGETVSASMLNRYYKHRCQLKELKDYGAAQDKKTREQLDHLYAEYIGQIPKDSKFDFTKDLKKLMDKSDLGQKIKDEIEAGDYLPKQRTSANGVIPHQMHQQELDQIIENQKEYYPWLAEPNPVEKNIKNAKYKLDQLVSFRVPYYVGPMITLADQQKTSKASFAWAVRKKAGKITPWNFYDMIDREKSANNFIKRMTNKDTYLLSEDVLPASSLLYQKFTVLNELNNIRVNGRKLQPALKQAIYTDLFQKRKTVNLKTLTNFLAIHEPTLTKPKIEGLSNGRSFNSSLGTYIDMSKILGDSLDDLNYRDDIEKIIEWSTVFEDSEIYGVKLQEIQWLTNEQREKLVRKRYQGWGRLSKKLLTGITDENGQRIIDLMWDTSKNFMQIVHQPVFEEQIAELNQQLLQDADKAPLEVVDDILADAYTSPQNKKAIRQVVKVVADVVKAVGNAPASISIEFARNEDRNKELKNSRRHSIEKLYHETAEKLVKQTNLLEELGNVKDLNDRYYLYFTQAGRDMYDGTPINIDEISTHYEIDHILPQSFLKDNSLDNRVLVKKSENAAKSDRVPAKLYGAKMRAFWKQLKESQLISNRKYLNLTTDPEQVDKYQMQGFVHRQLVETRQIIKLAANIFGSLYPDSAVIETRAELTKQLREKFSLYKVRDVNDYHHAVDAYLTAFAGHYLYQRYPKLRPMFVYGDYAKIYADDLKRLRSVNLFHDLEKDQYNSGTAVNPETKEKIVDVDWLSDYVSKIQHFKYMLISKAVYTQHGQLYGATILPVAQVDKISAPIGIKDDKPVDIYGAYTNEVAAYMAIVRVNGKKPKYKVVSVPVRMLQRLKMAEQKGHDQYMQTLHDVLLRNFTSLKKNRKTGLKEAVVKDFDVLVPCVRYNQLVIDGDTKFTLGSATYQHNAKQLVLCNHSLETLANNFEYVRKHPDEADERMIMLYDDILDQVNHYFTLYDKNKFREKLNAGRDKYLKLPTFSQFENNKKTAIGKSEAIINILRGLHANAAITNLKCLGVSTPFGQLQSPSGIELSENAKLVYQSPTGLFSREVLLKDL

SEQ ID NO: 507 - protein, 1382 aa, Lactobacillus pentosus
MKKIVNYNLGLDIGTSSIGYAAIDDQGRPVRHQNKTVMGVRLFKEGKTAESTRIFRGTRRRLSHRHWRLGYLDRIFDNEIAKVDENFLPRLKASKRARSDEKRSFRGSLLFPETGDDAYYQKYPTIYHLRYALITQKKQFDIRLIYLALHHMIKYRGNFLDTTPVSAFNIHDIDLTDQFASLNDCYQLLDMDFEFQFDLNNIEQVQKLLLDETLSKTKRQAAVSKVLVMSTGNKAFDDQQNGIASEFIKALLGGPFDLSKILNLSVADVKSWKLHMTDKDVDDTLNSLVEELDENHKQIVNLLQMIYSQVMMLGLLNGQQSISASMIERYDDHAKHWAALKKLLPALGEQEQSTIIHAYTAYTGHSRTKQLSRAEFYTKVNSILKKHENIAEATGLIELIDRNEFMPKQRDAVNGVIPHQLHQRELQLIIQNQQKYYPFLAAKAYPDADETMIEQLLSFRVPYYAGPLVDRDFINESSDQEQAMQNTKFSWLKRREAGEITPWNFEQKVDVQETANRFIKRLTTKDTYLMTEDVLPKESLIYQRFEVLNELNAIRINDRRLTAENKQLAFQQLFMAGNTKNVSIKKFRNFVFDSLKFPEKVKITGFAGQHNFLAKLSTYHDFKKIFGERVDHTDLQPDFERIVEWCTIFEDRHIYREKLKEIQWLSQSEIDQLVLIRNHGWGRLSKRLLTGIRDSDGRTVMDQLWFGTDNFMRIISQSDFAAAIANENRTQLNQHGLEDVLDSAFMSPQNKKAIRQVLKVVDDIEQTLGCPPKKVMIEFTRSPDKKKQRTVTRLEKVQQAYKAVADQLAGQSIVSELDQYANTHSKLSDTYYLYFMQLGRDLYSGKPIDIDSPMLDDDHILPRAFMKDNSLDNRALTEKPINNTKAAKFPSKVFGQQKEVTDFWKLLRRCGLMSNIKEKHLYLDPDNVDKWTRRGFIHRQLVETSQVIKIVANILNDRYQQSQTEVLEVPARLGTELRECFGWYKVREVNDYHHVFDAYLAAFIGNYLYRRYPKLQPYFVYGNFAELNKAQLKNIKSFNFLYNITDNKRVVKDIETGQTLWDDQIRQQIQHIYEYKYMLTSHEAFTQHKELYGQTIYPRREFKPGTLKAIKQDQPQELYGGYKNLTAAYMCIVKIQARKRRAAEYRVVRVATESLSALQQAKRLGVQAYERCLRQELVRNNEILRTNADPNSAPREFEVLLDRVLCHQMIISDGQKYLLGSHAYKINCMQLVLSNNSMKILSTSIVKLKQMTNEPLVQVYREILDVVNKYFTLYDVNSFRENLNQFFDKFRTLPITNEYESSKSGKKLIHRGQLETLTLILRGLHANSDKVQYGDQSTLLGGFQTKDGIKLSKDSVIQYTSPAGLNVRTVKLRDLEQKEAQK

SEQ ID NO: 508 - protein, 1361 aa, Lactobacillus pentosus
MNEPYGVGLDIGTNSVGWTVVDMNGRVRKVKGKTALGARLFKEGATAEDRRGFRTTRRRLKRVKWRLRLLREFFDQPISKIDPNFFARRKYSDISPRDPNYNGLAKTLFNDRTDKEFYDDYATIYHLRDKLMTSNRKFDIREIYLAIHHIVKYRGNFLRTGPASQYGSASLHLATSFQKLNDLFAQSEETLNLKLVTDEALLQQIQQILVRTDLSRSEQQRQIWPLMAVLTGASAAEKKRQKNVVVELSKALVGLKAKMNVVTLTEVDAAVVKDWTFTMEESQDKLPEIEEQLSEVGQQIMDEVIQLYASVNLAQLIPAGKRFSQHMVEKYKHHEKNLELLKAYIHSQSDSKRGREIRATYDRYIDGVDSKPVTQEMFYKDLMKYVEADATSNHLAAEIKDEIDSEQFMPKLRTKQNGSIPYQVQQYELDQIISHQKKYYPWLGEENPVAERRGKFPYKLDELVGFRVPYYVGPLITKEDQQATSGAGFAWMVRKADGPITPWNFDQKVDRIASATAFIQRMQTTDTYLIGEDVLPARSLIYQRFMVLNELNNMRVEDRKLAPQQKQRLYNQVFKQHQHVSVKNIQQNLMDAGEYRKTPQITGLADPKGFNSSLSTYHDFKKILLEAIADEHKRADIEKIILWSTTFEDSAIFKQKLEEVAWLTDAQRKQLSGLRYRGWGQLSHKLLTAFKDDKGRSIMDGLWETSDNFMQLRKQPAIETQIKEANQANLTDADIQDTINELYTSPQNKKAIREVMLVLDDIKNAMHGQTPSWIFVEAARGGGVAGRRTQSRSSQIVEAYKGTAKEIVSEKVQHELNEKIKAKADFNTRLVLYFLQNGRDLYTNEAINIDRLSEYDIDHILPQSLVKDDSLDNRVLTSARINREKNDTFASEKFGRKMGAQWRELHRNGLMTQRKLKHLLMRPDEISKHATDFINRQLVETRQVIKLVEELISSEYPAASIVAVKANLTHQFRQTFNFPKLREVNDYHHAFDASLTAFIGMYLLKQYPKLERFFVYGKFAKQPINLTRFNIIRKLAVAEKPIANIETGEILWDKTADIKYFEKLYNYKRLLVTHEVRENYGAMFKQTLFKASYNKSKTLVPKKNHMETSVYGGYSNQETAYLAIVRIPFKSGFKFIVVGIPTRMVAKIKHYQSLGATLNQATHKVIEPKFTKISRKTKQTVISDYEVVLPKVYLDQVVRDQVKGQMYRFSLGSDKEYHNVQELYLPLSIQQAFVGHYDESDDQRSNDLVKVYDAALKQLQRYFPLHLSRNFDQVASQAHQSFEGLKNNVQTSDKQLGKKEVLNSLFVGLHANATRSNLSVLGMSKDFGRIKSNGITLTDQAEIIYQSPTGLFERKVALKDL

SEQ ID NO: 509 - protein, 1358 aa, Lactobacillus pentosus
MNEPYGVGLDIGTNSVGWTVVDMNGRVRKVKGKTALGARLFKEGATAEDRRGFRTTRRRLKRVKWRLRLLREFFDQPISKIDPNFFARRKYSDISPRDPNYNGLAKTLFNDRTDQEFYHDYPTIYHLRDKLMTSDRKFDIREIYLAIHHIVKYRGNFLRTGPASQYGSASLHLATSFQKLNDLFAQSEESLNFKLVTDEAQLQQIQQILVRTDLSRSEQQRQIWPLMVVLMGATAAEKKRQKDFAKELANALVGLKAKLNVVTLTNVDTTVVKDWTFTLEESQDKLPEIEEQLSEVGQQIMDEVIQLYASVNLAQLIPAGKRFSQHMVEKYNHHEKNLELLKAYIHSQSDSKRGREIRATYDRYIDGVKSKPVTQEMFYKDLMKYVEADATSNHLAAEIKDEIDSEQFMPKLRTKQNGSIPYQVQQYELDQIISHQKKYYPWLGEENPVAERRGKFPYKLDELVGFRVPYYVGPLITKEDQQATSGAGFAWMVRKADGPITPWNFDQKVDRIASATAFIQRMQTTDTYLIGEDVLPARSLIYQRFMVLNELNNMRVEDQKLAPRQKQRLYNQVFKQHQHVSVKNIQQNLMDAGEYRETPKITGLADPKGFNSSLSTYHDFKKILPEAIADEHKRADIEKIILWSTTFEDSAIFKQKLEEVAWLTDAQRKQLSGLRYRGWGQLSHKLLTAFKDDNGRSVMDGLWETSDNFMQLRKQPAIETQIKEANQANLTDADIQDTINELYTSPQNKKAIREVMLVLDDIKNAMHGQTPSWIFIEAARGGGVAGRRTQSRSKQIVEAYKSTAKEIVSEKVQHELNEKIKAKADFNTRLVLYFLQNGRDLYTNEAINIDRLSEYDIDHILPQSLVKDDSLDNRVLTSARINREKNDTFASEKFGRKMGAQWRELHRNGLMTQRKLKHLLMRPDEISKHATDFINRQLVETRQVIKLVEELISSEYPSASIVAVKANLTHQFRQTFNFPKLREVNDYHHAFDASLTAFIGMYLLKQYPKLERFFVYGKFAKQPINLTRFNVIRKLAVAEEPIANIETGEILWDKTADIKCFEKLYNYKRLLVTHEVRENYGAMFDQTIFKATDSRKRLIQKKKGFATETYGGYTGRTLAYLAIVKVVTNKDTQYQVVGIPTTMVTQIQQLEASGLTSKQAVTKAIGAMINENNKKLQSYEVLLPKVRFEQVVRDEVKGHIHRFALGTDTYYHNIQELYLPLTIQRAFLGKRNDTDAQTEQNLLTVFETTLAQVNRYFPLYEMNKFKQILNSAQEKFAALPTKNKTVKNKLVTGKDGVLNNLFIGLHANASLGDLKILGMKIGFGKLQVPGGLKLTDQAEIIYQSPTGLFERKVALKDL

SEQ ID NO: 510 - protein, 1358 aa, Lactobacillus plantarum
MKEPYGVGLDIGTNSVGWTVVDASGHVRKIKGQTGIGVRLFKEGAAAADRRGFRTTRRRLKRVKWRLRLLREFFDQPISKVDINFFARRKYSDVSPRDPNYNGLEKTLFNDRSDQDFYHDYPTIYHLREALMTQHRKFDVREIYLAIHHIVKYRGNFLRNDAATAYRSGTLDLQQHFETLNHLFSQADLELNLNLTTDVALLDSIKQTLVRTDISRSDRQKLIMPLLAVLTGATTAEKKRQKAVVTEFAKALVGNKTKIDVLTLTDIDATEAKDWAFSLEENQDKLPGIEDRFSEVGQQIIDEVIRLYASVNLAQLIPEGKRFSQSMVEKYKRHGEDLKLLKAYIRSQSDAKRGRAIRATYDQYIDGVKSKQVTQEAFQKALGKFVDADVDLNSWAAQIKQAIDSEQFMPKLRTKQNGAIPYQVQQNELDQIISNQKEYYPWLGEENPVIKRRGKFPYKLDELFGFRVPYYVGPLITKEMQAATANAGFAWMVRKADGPITPWNFDDKVDRVASATAFIQRMQTTDTYLIGEEVLPARSLIYQRFMVLNELNNIRVDDGQLTPRQKQRLYNQVFKKHKRVTAKNIQDNLVAAREFPTAPRITGLADPKVFNSSLSTYHDLKQVLPEAMSDVRKQADIEKIILWSTIFEDSTIFKQKLTEISWLTAAQLKQLGQLRYRGWGQLLRKLLTGLKDDNNRSIMDGLWETNANFMQLRSQPAIENQIKSANQANLTTADLQDTINELYTSPQNKKAIREVMVVLADIKDAMHGQTPNWIFVEAARGGGVAGRRTQSRSKQIVAAYQGTAQAIVRDQVQRELKEKIKNKANFNTRLVLYFLQNGRDLYTGDAINIDRLSEYDIDHILPQSLVKDDSLDNRVLTNARINREKNDTFASEKFGKKMGAKWKEMHRMGLMTKRKLDHLLMRPDEISKYATGFINRQLVETRQVIKLVEELINAEYPSTAIVSVKANLTHQFRQTFDFPKIREVNDYHHAFDAALTAFIGTYLLKRYPKLERFFVYGKFAKQPVNLTRFNVIRKLAKTDTPITDIDTGEVLWDKLTDIKYFETLYDYKRLLVTREVSENYGAMFDQTLLKASDNGKRLIRKKQSFDTAIYGGYTGKTLAYMAIVKVSTKKDVQYQVVGVPTTMVTQIEQLEQQGMTNKQAVTKVIEPLIAANNKKMLTYEVLLPKVRFEQVVRDRIKGQTHRFALGTDTYYHNIQELYLPLTLQRAFLGKQNESEVQLNQNLLTVFDATLAQVNRYFPLYEMNKFKKILNSARDQIELLEAKNQFVKNKLVLGKQGILTNMFIGLHANASYGDLKVLGVKIDFGKLQVPGGIKLTGDAEIIYQSPTGLFERKIALKDL

SEQ ID NO: 511 - protein, 1361 aa, Lactobacillus rhamnosus
MTKLNQPYGIGLDIGSNSIGFAVVDANSHLLRLKGETAIGARLFREGQSAAERRESRTTRRRLSRTRWRLSFLRDFFAPHITKIDPDFFLRQKYSEISPKDKDRFKYEKRLFNDRTDAEFYEDYPSMYHLRLHLMTHTHKADPREIFLAIHHILKSRGHFLTPGAAKDFNTDKVDLEDIFPALTEAYAQVYPDLELTFDLAKADDFKAKLLDEQATPSDTQKALVNLLLSSDGEKEIVKKRKQVLTEFAKAITGLKTKFNLALGTEVDEADASNWQFSMGQLDDKWSNIETSMTDQGTEIFEQIQEHYRARLLNGIVPAGMSLSQAKVADYGQHKEDLELFKTYLKKLNDHELAKTIRGLYDRYINGDDAKPFLREDFVKALTKEVTAHPNEVSEQLLNRMGQANFMLKQRTKANGAIPVQLQQRELDQIIANQSKYYDWLAKPNPVEKHRASKPYQLDELLTFRIPYYVGPLITPKEQAESRENVFAWMIRKDPSGNITPYNFDEKVDCPASANMFIQRMKNTDTYLIGEDVLPKRSLLYQKYEVLNELNNVSIDGRRLGADQKQRLIREVFERHSSVTIKQVAENLVAHGDFAKRPEIRGLADEKRFLSSLSTYHQLKKILHEAIDDPTKEHDIENIITWSTVFEDAAIFKTELAKISWLDSDTIKALSNIRYRGWGQFSRKLLDGLKLGNGHTVIQELMLSNHNLMQILTDETLKTTMAELNQDKLKADDIEDVINDAYTSPSNKKALRQVLRVVEDIKHAANGQDPSWLYIETADGPGTAGKRTQSRQKQIQTVYANAAQELIDSAVRGELEDKIADKASFTDRLVLYFMQGGRDIYTGAPLNIDQLSHYDIDHILPQSLIKDDSLDNRVLVNATINREKNNVFASTLFASKMAATWRKWHEAGLISGRKLRNLMLRPDEIDKFAHGFVARQLVETRQIIKLTEQIAAAQYPNTKIIAVKAGLSHQLREELDFPKNRDVNHYHHAFDAFLAARIGTYLLKRYPKLAPFFTYGEFAKVDVKKFREFNFIGALTHAKKNIVAKDTGEIVWDKERDIQELDRIYNFKRMLITHEVYFETADLFKQTIYAAKDSKERGGSKQLIPKKQGYPTQVYGGYTRENTAYLAVVKTVEKKADVYRVVRIATSQVAALKEARAQSTVKERELLKKFLTTKFTKIGKNGKKAITPFDIVIPRVPREQLFHNKRYGFFMVNSDTLMHNYQELWMSRSDQQILSKLVKSAKTVENGQVGRLFENIVEQINKYFPLYDINQFRKKLDQSKDIFSKLPLEGNGTTSGKRETIQNILTGAGTGAKNGDLKNLGIKTPFGFLQVPSGIVLDDDTTLIYQSPTGMLNRIVRLSEL

SEQ ID NO: 512 - protein, 1361 aa, Lactobacillus rhamnosus
MTKLNQPYGIGLDIGSNSIGFAVVDANSHLLRLKGETAIGARLFREGQSAAERRESRTTRRRLSRTRWRLSFLRDFFAPHITKIDPDFFLRQKYSEISPKDKDRFKYEKRLFNDRTDAEFYEDYPSMYHLRLHLMTHTHKADPREIFLAIHHILKSRGHFLTPGAAKDFNTDKVDLEDIFPALTEAYAQVYPDLELTFDLAKADDFKAKLLDEQATPSDTQKALVNLLLSSDGEKEIVKKRKQVLTEFAKAITGLKTKFNLALGTEVDEADASNWQFSMGQLDDKWSNIETSMTDQGTEIFEQIQELYRARLLNGIVPAGMSLSQAKVADYGQHKEDLELFKTYLKKLNDHELAKTIRGLYDRYINGDDAKPFLREDFVKALTKEVTAHPNEVSEQLLNRMGQANFMLKQRTKANGAIPVQLQQRELDQIIANQSKYYDWLAKPNPVEKHRASKPYQLDELLTFRIPYYVGPLITPKEQAESRENVFAWMIRKDPSGNITPYNFDEKVDCPASANMFIQRMKNTDTYLIGEDVLPKRSLLYQKYEVLNELNNVSIDGRRLGADQKQRLIREVFERHSSVTIKQVAENLVAHGDFAKRPEIRGLADEKRFLSSLSTYHQLKKILHEAIDDPTKEHDIENIITWSTVFEDAAIFKTELAKISWLDSDTIKALSNIRYRGWGQFSRKLLDGLKLGNGHTVIQELMLSNHNLMQILTDETLKTTMAELNQDKLKADDIEDVINDAYTSPSNKKALRQVLRVVEDIKHAANGQDPSWLYIETADGPGTAGKRTQSRQKQIQTVYANAAQELIDSAVRGELEDKIADKASFTDRLVLYFMQGGRDIYTGAPLNIDQLSHYDIDHILPQSLIKDDSLDNRVLVNATINREKNNVFASTLFASKMAATWRKWHEAGLISGRKLRNLMLRPDEIDKFAHGFVARQLVETRQIIKLTEQIAAAQYPNTKIIAVKAGLSHQLREELDFPKNRDVNHYHHAFDAFLAARIGTYLLKRYPKLAPFFTYGEFAKVDVKKFREFNFIGALTHAKKNIVAKDTGEIVWDKERDIQELDRIYNFKRMLITHEVYFETADLFKQTIYAAKDSKERGGSKQLIPKKQGYPTQVYGGYTRENTAYLAVVKTVEKKADVYRVVRIATSQVAALKEARAQSTVKERELLKKFLTTKFTKIGKNGKKAITPFDIVIPRVPREQLFHNKRYGFFMVNSDTLMHNYQELWMSRSDQQILSKLVKSAKTVENGQVGRLFENIVEQINKYFPLYDINQFRKKLDQSKDIFSKLPLEGNGTTSGKRETIQNILTGAGTGAKNGDLKNLGIKTPFGFLQVPSGIVLDDDTTLIYQSPTGMLNRIVRLSEL

SEQ ID NO: 513 - protein, 1352 aa, Lactobacillus ruminis
MNDNFDLMRVKGKKGIGVRLYNEGQSAAERRMHRTARRRYGRRKWRLRLLEDFFDEHMAEVDDTFFARLKDSNISPKDDKKYRKSLLFPKSKGVTYQDDGEFYKKYPTMYHLRYALMTEHRKFDLREIYLAFHHMVKYRGNFLYDTSVDSFEAKNLDIKGKFDEINDLLSSYTDFYVDNSNAALVESILLEKNTTRKDKSKKIAKLLHVEDKEKGKNKKAKDLATQISNAVLGLKCNFHLIFELQQKYSFDLCSEKTEENIAKLSEVLDENQKMLLMILKEVQDQVMLNAFVPSGMSLSEAMMQKYDDYGEQLKIYHELEHSVSDDSAAKLRGAYRDYNDNIIKRIDGDNKKDTFYKRVKNILTKISKEYVDQDVLESCGKLKKLIDENKLFIRQRTAANGVLPHQLHQIEMRKIIDNQKEYYPWLAEPNPNEKRRVYSKYKVEELIAFRIPYYVGPLVDPNNADKNKEARFSWMVRKKDGEITPWNFYDKVDWAESANNFIERMKSKDTYLLGEDVVPKESMLYQKYEVLNELNNLRINDSGLSDSFEDVKLKQAIYNDLFKKQKIVKITDLQNYLVQNHKYLVKPKISGLADENRFLSSLSTYSDLKTIFGDKVDDRTYFNDFEKMVEYSTVFEDGHDYNQKLDEYTWLTKEEKYKIGKKRYRGWGKLSKKLLTGLRDKNNHTIMDNLWETNRNFMQIQTADEFSKQIAEENERHLKGSVSDAINDMYTSPANKKAIRQVLRVVDDIQKAMGYAPSSISLEFAREDGPSVRTVSRANRMKSIYEKYASEVSEEVMKDLDGVIKDKKGLNDRLYLYFEQQGKDMYSGHPLDFDKVISGQEYDIDHILPQAVIKDDSLDNRVLTTKALNNDVKSKGVPCRMFNGMHSFWKNLYDKGFISRRKFNNLTTNPENIDKYKMKGFVNRQLVETRQIIKLVANVLNDKYQNDDVDIIEVRAELTHDVRKHFKFYKNRNVNDYHHAFDAYLTSFIGHYLFKKYPNLRPLFDYNDFMKVSDNVFKQLRGNNFLGEFLNKTGDIISTDGNFVLNKEEMINKLNKAYAFKKILVTKEVGQRTGAMFNETRYPAPNSRKAALKYRRMPKPDSLISVKDYKNTDIYGGYSGKNDAYMVIVDMGKQYMVVGVPVRYTEKLDKLRIKHSELYRDELRKVLSRDKTLLDSKGNVKRFDIVLDRVLYGQLIEDGNELFTLGSSKYKRNFRQLFLDKQCIEILDSSATPQPTDEELIWVYDQILDKVDKYFELYDINRQRETLRKGRAAFCSLPNISMKKDDVTKKKILNEILVALHANESESNCEKIGKKVFGRLQVPGGIKLSKEAKLIYQSPTGLFERVVYLKDL

SEQ ID NO: 514 - protein, 1339 aa, Lactobacillus salivarius
MERYHIGLDIGTSSIGWAVIGDDFKIKKKKGKNLIGTRLFNEGATAAERRGFRTQRRRLNRRKWRLKLLEEIFDPYMAEVDEYFFARLKSSNLSPKDSNKKYLGSLLFPDKSDSNFYDKYPTIYHLRRDLMEKDEKFDLREIYLAIHHIVKYRGNFLEKVPAKNYKNSGASIGFLLEEVNSLYKDIIGDESIAILNSEKFEDVEKIILDEETRNLDKQKSVGKLLVEDKKKKNIVTAFSKAIFGYKFNIEDLLLIENDEKNKLTFNDENIDDIFNELSHSLDDKQMDLLTKTREIYFKFKLNMIVPTGYTLSESMIEKYEMHKAHLKMYKEFINTLNTKDRKILKNAYSDYINTEKAKAANAQENFYKTVKKIIKDNNSDTAKKIIVLIDEGNFMPKQRTGENGVIPHQLHQIELDRIIENQAKYYPWLAEANPVEKNRKFAKYKLDELVTFRVPYYVGPLIDKTESNKNEKETKFAWMVRKAKGTITPWNFENLVDRTESANRFIKRMTSKDTYIIGEDVLPASSLLYEKFKVLNELNNIKVNEKKLDIEQKQDIYLNLFTTAKNVTKKSLATYLNCSADSISGLSDGEKFNSSLSSYIDLKAILGNIVDDCNKNEDLEKIIEYSTVFEDGNIYKEKLSEISWLTDEQIEKLSNIHFKGWGRLSKKLLTQITNENGERIIDALWNTSNNFMQIINDESIQAKLAEINGKYAGKSDLEDILSEAYTSPQNKKAIRQVMKVVEDIEKAMQCEPTSISIEFTRKKQKSRLTNTRYKKISDVYEKIADEVISEYELRKLQSELDSNANNMRDRYYLYFMQLGRDMYTGEKINIDELHQRYDIDHILPQSFIKDDSINNRVLTRKDVNNKEKSDKTAADLYAVEMSDFWRKLRKQGLITEQKYKNLLTKSDSIDKYAKKGFIKRQLVETSQVVKLVANILQDKYSDTKIIEVRAKLNSNLREEYKLIKNRAVNDYHHAIDGYLTTFIGQYLYKTYPKLRSYFVYNDFKKLDSNYLKHMKKFNFLWQLQDDKTIDIYDNVNNKFVLNVPEMKKYIQKIYNYKYMLVSKEVTTKNGAFYDQTKYNAKTVNLIPIKKNKPTNIYGGYKGKVSSYMMLVKIRKKKEVIYKFVGVPRLWTDELDRLKDTTERKILLNEIAKNSLSKTEQDFEVILDKVYYGQLIIDGNQKYTLGSSEYKYNAMQLHLSKHALEVLAKENVKDAEITDKDLVSVYEEILSVVNKYFELYDINKFRQKLNEGLEIFRKLPVYNVYESNKIKQVGKFEVLNRILMGLHANAMITDLKVLGIKTKLGQMQVNGGIKLSPDAKLIYQSPTGIFSRAVRVKDLG

SEQ ID NO: 515 - protein, 629 aa, Lactobacillus salivarius
MERYHIGLDIGTSSIGWAVTGDDFKIKRKKGKNLIGTRLFKEGNTAAERRGFRTQRRRLNRRKWRLKLLEEIFDPYMAEVDEYFFARLKDSNLSPKDSNKKYLGSLLFPDISDSNFYDKYPTIYHLRRDLMEKDEKFDLREIYLAIHHIVKYRGNFLENVPAKNYKNSGASIGFLLEEVNNLYKDIVGDENVTILNSEKFEDVEKIILDDGIRNLDKQKGVGKLLVEDKKNKNLVTAFSKAIFGYKFNIEDLLLVEGDEKSKLTFNDENIDDIFNELSHSLDDRRMDLLTKTREIYFKFKLNMIVPTGYTLSESMIEKYEIHKAHLKMYKEFINTLNSKDRKILKNAYTDYINNEKAKAANAQENFYKTVKKTIKDNDSDIVKKIIDLIDEGNFMPKQRTGENGVIPHQLHQIELDRIIENQAKYYPWLAEENPVEKNRKFAKYKLDELVTFRVPYYVGPLVDKTESNKNEKETKFAWMVRKSKGTITPWNFENLVDRTESANRFIKRMTSKDTYIIGEDVLPASSLLYEKFKVLNELNNIKVNEKKLDIEQKQNIYLKLFTTTKNVTKKNLATFLNCSIESISGLSDDKKFNSSLSSYIDLKVILGDIVDDYSKNEDLEKIIEYSTIF

SEQ ID NO: 516 - protein, 897 aa, Lactobacillus salivarius
  misc_feature (822)..(822): Xaa can be any naturally occurring amino acid
MLIESDEKNKLTFNDENIDDIFNELSHSLDDNQMDLLTKTREIYFKFKLNMIVPTGYTLSESMIEKYEMHKAHLKMYKEFINTLNAKDRKILKNAYSDYINNEKAKAANAQENFYKTIKKTIKDNNSDTAKKIIGLIDEGNFMPKQRTGENGVIPHQLHQIELDRIIENQAKYYPWLAEENPVEKNRKFAKYKLDELVTFRVPYYVGPLVDKTESNKNEKETKFAWMVRKAKGTITPWNFENLVDRTESANRFIKRMTSKDTYIIGEDVLPASSLLYEKFKVLNELNNIKVNKKKLDVEQKQHVYLDLFTTRKNVTKDNLATSLNCDVESITGLSDNEKFNSSLSSYIDLKAILGNAVDDCNKNKDLEKIIEYSTIFEDGNIYKEKLSEISWLTDEQIEKLSNIHFKGWGRLSKKLLTQITNENGERIIDALWNTSNNFIQIISDESIQAKLAEINGEYADKSNLEDILDEAYTSPQNKKAIRQVMKVVEDIEKAMKCKPTSIAIEFTRRKGKSKLTNTRYKKISETYEKITDELISEYELGKLQSKLDSKANNMRDIYYLYFMQLGRDMYTGEKINIDELHQYYDIDHIFPRSFIKDNSLNNRVLTRKEINNNEKADRTAADLYAVKMGDFWRKLRKQGLITEKKYKNLLTRTDSIDKYTKQSFIKRQLVETSQVVKMAANILQDKYSNTKIIEVRARLNSDLRKEYELIKNREVNDYHHAIDGYLTIFIGQYLYKTYPKLRSYFVYDDFKKLDSNYLKHMDKFNFIWKLEDKKAEDVYDNVNNEFILNVPKMKDYIQKIYNYKYMLISKEVTTESGAFYXZTKYNAKTINLIPIKKDKPTNIYGGYKGKVSSYMMLVKIQKKKEVIYKFVGVPRLWTDELDRLIDTDEKKALLKK

SEQ ID NO: 517 - protein, 1419 aa, Lactobacillus sp.
MAKPQNYTIGLDIGTNSVGWTVTDDQNNILRIKSKKAIGARLFEEGKVAAERRSFRTTRRRLSRRKWRIKLLEELFDEEISKVDPNFFARSHESWISPKDKRERYSAIVFPTPEEDKKFHNEYPTIYHLRDRLMKDDQKHDIREIYVAIHHIMKYRGNFLHDESIETYRSGMSSLGGGDERTILNTKILDDLNDAFADNLATQGISVNSASADQINEIVTSGHLNVDSQKAIAKLLLPTTLSSDDKKQDKKIKKLATDAAKNVASAWLGYKANFAAILNIQEVDKDKKKIYSFALQGADEEDKVETLESVLSQDQIEIVDRIIRIRHAIVLGEIIPVGMTLSEAMIEKYDQHAKDLKNLKTVIRNLKDRKNAVKLQAIYDLYVNNRHADTAKAMKLAGVKKRTELLEPEEFNKSIEKLLDDSPVSAEIKKRIAEKDFLPLQRSNSNGVIPNQLHQIELDEIIKKQSKYYPFLGETNEHASADVARKAPTKLDQLLTFRVPYYVGPLITKEEQEEQDGHSFAWMIRKNPKDHEKITPWNFDEKVDRMASATQFIKRMTTKDTYLLGEDVLPSSSLKYQLFTVLNELNNLRINHKKLTREEKEQVIEDLFKKYKTVKADKFKNYWQKGHAGLDVKIQGMADPEKFNSTMSTYIDLQKIFGDQLDDAQRQNDFEKIIEYSTIFEDRKILGEKLRADFVWLSEDQIKRLCRLRLQGWGRLSLKLLTRLTDADGQNVLERLLNSNDNFMQIVKDPVIKAKIEQKNQKLLRADWSENATESILDEAYTSPQNKKAIRQVMRVVHDIVKACDGNLPAKFAIEFARSQDDDPKRTVARADRLQKIYAQISDEVVSQGVKDQLSGMKSLKDRYYLYFMQGGRDAYTGKPLNIDRLSDYDIDHIMPQSFIKDDSLDNRVLVTRAVNNQKSDNVPVLLYGNHLVADLGITIREMWDRWQKSGMISKRKLANLLTDPATLSEYRAEGFINRQLVETSQVIKLTATILQSEFPDSKIIEVPAKYNSILRKQFDLYKSREVNDYHHAIDAYLSTIVGNYLYQVYPNLRRLFVYGEFKKFSHGEEESSHQAVRRVKSMNFLDDLLRGKHGDDIYCRVTGEVIFSRKDIISKLKQAYSFKQMLVTQEVFTKKSALFDQTVYPSPARDSKTRSGLIPRKQGMDTEIYGGYSGNKDAYFVLAQVVKSKGHTLQVVGVPIRALRALANCSNYSEQLLKIVKAQVLFNKKTGKAKKGISDVRILLDKIPYRQPVLDGSAFYMLGSSTYKYNLKQISLSQQSMKYILDYIDDPNFNKHEMTKIDQQNEKECLLSVYDEILDKMDKYLSLYDINGFRKKLHVGRDKFIKLEVEKQAEAIKNVLRGFHANSDMTKLSDLGLSTSLGFMQASDGIKLSDNAVFIYQSPTGLFERRVKVSDLLK

SEQ ID NO: 518 - protein, 1289 aa, Lactobacillus versmoldensis
MRRRYRRRRNRLNWLDELFADELAKIDPSFLLRMKNSWVSKKESTRKRDPYNLFIDEKYNDVDYFNQYPTIFHLRKELITEDKKVDIRLIYLAIHNIIKYRGNFTLENQNFDISQLSSNFSQQISDFFALFSDFGVIMPEDFDPDKISDILLNPNLSPSGKVSEAIATISPKTNVKAKIKIILLLLVGNNGDLKKLFDLETTEKIAVKLSSRHIDSELPIILSELNEQQENIITIANSIFGSIILKDFLGDETSISAAKVISFEDHKQDLQKLKTMWRETSNKEAVKAGKKAYEDYIGHEDSETFYKKIKKFLEKAQPVDLANKALAEIELENYLPKQRNRNNTVIPYQLNENELIAILDHQEKYYPFLKENRDKILSLLTFRIPYYVGPLQDSNNNRFSWMTRKASGAIRPWNFSEKVNVEQSSNDFIKRMRSTDTYLIGEPVLPKKSLIYQCYEVLSELNNTRVKDGSSNPKRLDVTIKQRIYNEIFKNQKSVSVKVLQNWLIKESYFKSPEISGLADKKKYLSSLSTYIDFKKIFGQRFVDDPVNSPQLEELAEWLTLFEDKKILLIKLQNSKYSYDQATINKLSTMRYQGTGKLSKKLLVDLKTTKKSIGKSGAESLSILDLMWSTKDNFMQIIHDADYTFEQQIKEFNYDTEDELTPLEKVANLHGSPALKRGLNQSIKVVADIVKFMGHDPEKIFIEFTRSDDFSKLTISRYRRIKKQYLEIAKAIKKIPAEFKDIKEYQTQLEENKGKLASERLMLYFLQCGHSLYSNKPIDLNMINSSKYHVDHILPQSYIKDDSLENKALVLASENENKIDNMLISHDIIATNLPRWQALKDQNLMGSKKFADLTRTTVTENQKKGFIQRQLVQTSQIVKNITLILNDLYKNTSCIETRATLSSEFRKAFSNFDETTYHYQFPEFVKNRDVNDFHHAQDAFLACVIGEYQLKKYPKDNLRLVYDQYSKFLDSLKKDTRKKNGRMPRYTQNGFIIGSMFNGKTYVDDNGEIIWDQKIKESIRKTFNYHQFNVVRQTIEQHGKLFNDTIQPHSDRYKLIPLKTNRDPAIYGGYNNDNNAYSVVLDVDGKKKINGIPIRIANQLKSDELDLSSWLENNIKHKKPMTILIDKVPKYQRIINEETGDLLITSANEVINNVQLFLPSMYTALISLLDSTKTEMYSKLLSNYEANILIDIYDYLLTKLKNNYPLYRKEWAKLAEHRDDFIESDLVTQASTLQQLIKFMHADPSNVNLKFGNFKGNRFGRKNGNIKLSKTDFIYESPTGLFKSIKHID

SEQ ID NO: 519 - protein, 1372 aa, Legionella pneumophila
MESSQILSPIGIDLGGKFTGVCLSHLEAFAELPNHANTKYSVILIDHNNFQLSQAQRRATRHRVRNKKRNQFVKRVALQLFQHILSRDLNAKEETALCHYLNNRGYTYVDTDLDEYIKDETTINLLKELLPSESEHNFIDWFLQKMQSSEFRKILVSKVEEKKDDKELKNAVKNIKNFITGFEKNSVEGHRHRKVYFENIKSDITKDNQLDSIKKKIPSVCLSNLLGHLSNLQWKNLHRYLAKNPKQFDEQTFGNEFLRMLKNFRHLKGSQESLAVRNLIQQLEQSQDYISILEKTPPEITIPPYEARTNTGMEKDQSLLLNPEKLNNLYPNWRNLIPGIIDAHPFLEKDLEHTKLRDRKRIISPSKQDEKRDSYILQRYLDLNKKIDKFKIKKQLSFLGQGKQLPANLIETQKEMETHFNSSLVSVLIQIASAYNKEREDAAQGIWFDNAFSLCELSNINPPRKQKILPLLVGAILSEDFINNKDKWAKFKNFWNTHKIGRTSLKSKCKEIEEARKNSGNAFKIDYEEALNHPEHSNNKALIKIIQTIPDIIQAIQSHLGHNDSQALIYHNPFSLSQLYTILETKRDGFHKNCVAVTCENYWRSQKTEIDPEISYASRLPADSVRPFDGVLARMMQRLAYEIAMAKWEQIKHIPDNSSLLIPIYLEQNRFEFEESFKKIKGGSSDKTLEQAIEKQNIQWEEKFQRIINASMNICPYKGASIGGQGEIDHIYPRSLSKKHFGVIFNSEANLIYCSSQGNREKKEEHYLLEHLSPLYLKHQFGTDNVSDIKNFISQNVANIKKYISFHLLTPEQQKAARHALFLDYDDEAFKTITKFLMSQQKARVNGTQKFLGKQIMEFLSTLADSKQLQLEFSIKQITAEEVHDHRELLSKQEPKLVKSRQQSFPSHAIDATLTMSIGLKEFPQFSQELDNSWFINHLMPDEVHLNPVRSKEKYNKPNISSTPLFKDSLYAERFIPVWVKGETFAIGFSEKDLFEIKPSNKEKLFTLLKTYSTKNPGESLQELQAKSKAKWLYFPINKTLALEFLHHYFHKEIVTPDDTTVCHFINSLRYYTKKESITVKILKEPMPVLSVKFESSKKNVLGSFKHTIALPATKDWERLFNHPNFLALKANPAPNPKEFNEFIRKYFLSDNNPNSDIPNNGHNIKPQKHKAVRKVFSLPVIPGNAGTMMRIRRKDNKGQPLYQLQTIDDTPSMGIQINEDRLVKQEVLMDAYKTRNLSTIDGINNSEGQAYATFDNWLTLPVSTFKPEIIKLEMKPHSKTRRYIRITQSLADFIKTIDEALMIKPSDSIDDPLNMPNEIVCKNKLFGNELKPRDGKMKIVSTGKIVTYEFESDSTPQWIQTLYVTQLKKQP

SEQ ID NO: 520 - protein, 907 aa, Leptospira inadai
MAKSIEEIRSIQNEFVVEYSILLKKIKKGEIDKKNDVYKVYQNTIKSSERLEQVLKERLGFQNVSKSYFNNPYSIAQLYNLISVDRSGFSKVCRSCQEENHWRSTLIDTDRGPQAQASKQVSDTGRPFDGQLAMLLDRIAFEIVKLKRIEIERLLSNKNSSKIEVVEIPLLIEENSFNFRYELAELKKLSKKKKDQLKKSVEEFDTKLNSKQERIKAASRELCPYTGKKISKGEIDHILPRSWTQKQFGTALNAEANLIYASREGNQSKGNREYGLNDLDEKYLNIIFGTKEVDSIQRNISDTIDRLDIERGTTRIVFDRLAPNERDCLRHALFIKSLRPKVFELLSGQLKARVNGTQLYLAKRIRSLLLKNQDFITKSLIIKVPSFSFYEPRTVDLPYMRKELAEKFPNLGKQNPQPTGSHIIDAAMVMAYAVETDSGNLSFGSKDKSEGFDSESLSRFLPSNIQFLSIKSKDKTDSKYPYKKPLFKDGVFGERFLPILIAEKGLRVGYTLENSLEVNSENPEEFFNVLKPYLLFKRKPIESNYQTLVAFAQKDKRGYIVLPVNKPKALESISQRKSDPHTSILKNILYTVSRESIPSLIFDKNTLIPEIKSNKVNWGDKLEKKFRIKIEIKLYGKKIADGFIRYPGKTEWEKLLLTEPLKGLVKNKTLTPKWFDSLENLAGLDDHFKDTSNPEAKHKRKSNHYALPVPKGPSGGFRIRRNSFDGYKVYQLYSVDGNSFHAFKIENGWTGKTLLLDIYQNSGNLHSLDYDYENTDISQTALFSKFYKIEFSKEETQKINSKGIKSLYVAPGSSSRQYIRVIFDKQTFSKFIKFQSKFWEFDLITPLPKDKAKDLIESILKIFPEDLRPKKPRNDIHIQNISHDSVQVEYIADGKTQGFGQYFINQN

SEQ ID NO: 521 - protein, 418 aa, Leptospira inadai
MILKSPIAIDLGAKNTGIVYTTYQPNALPTEIHGATIISDNLKLSQVDRRAKRHQRRNYTRMKLARRLVYLIIRYHYRIPEQDLTPEVKTSLQSLLTRRGYTFQSIETEGNELGQAPWGEIEDYFPNVQDYEKSLPIQTVLYHFFSSENLELNKLVPSKEPETKEDKNILKYIREQKEAFESEQNNGARHRLKYFEEIKEDFPRKIKLMECLQKNKIEEKKFLNLIQNISNLQIKPLRAYFNDKDMKEKEIWEPRRLHTYIARWIRSWHIDPKNSSKRLIRQKLLSQLENGKLKIIRDTSIYSPSKDIISFLEEIDPKDTIPPYEDQNNRHPPRCQNLWLDGKILDRYFPGWEQSLWKLIRNEKNNPFEQLITKDFRTDDTISEGKSLSEQIQIYERSHSNIKLDVRAVILQRFLDRS

SEQ ID NO: 522 - protein, 125 aa, Leptospira inadai
MSAYDRSANLDPWSLRLQGKAKKEIKTTESLSKTDLQKASDAYEKIKEILSESDTDQFIKLANRYYLEVADIKKGMWLPTAPERKHKEIPKSIAHEENQDISLFHKCNTKTGSKKRISQVSLEMF

SEQ ID NO: 523 - protein, 1355 aa, Leuconostoc gelidum
MTYSIGLDIGTGSVGWAVIGDDYRLKRAKGKNLIGVRLFDSATTAAERRGYRTTRRRLSRRHWRLRLLNDIFASDLAEQDENFLPRLKYSWVNPDDEQNPQLNSDVANGALFGSSETDKAFHKNYPTIYHLRHELMTDTAKHDLREVYLAIHHIVKYRGNFLNTADKINAENSFNVDLFIAALDEYNEFLETPITSIKDAQLFSDKLTDINARNKSVRVENAMSETYDDKSKIFKAILTALVGNTANFQTIFDLSDLEKDEAKNFKFKLDLEDVETKLDVVRAKLSDEQNAFLEAVLIAYDGITLKMILGDYKSISQSMIESYKSHQRDWKYIKNNVRLNEQKIEPDKNSVKFFKLDPKKLIYPSNLAYLQVISSNEDEHRKGLDYFKTAIQDADILQRIENDTFLPRQRTKRNGVLPYQLHLAELEQIIKKQSKYYPFLANIYTQDNKTENKLIGLLKFRVPYYVGPLVEAEKVTGDGKNHWLIKKELQENTPITPFNFDDVVDKDKSGEQFIKRITGTDSYLIGEPTLPENSLLYQKYNVLQELNNVRNERHQRLPIKVKQDIFEHVFKIDKNVNAKKVMAYLKLNGYGDFQIAGLSDTRTGKFNSNLSSYNYFVDLLGREKTEKIREDRLEEIIEIQTVFEDKILVAKRLSNLDFLTPQEKSKLSAKHYTGWGRLSQKLLTTQFIKTALSEAGDIIPQSHSIIDLLYYTDKNLMEILNDKTFNVRNWLTEQNKGTESGNSLYDQIDALAGPKDIKRGITQVFSIIDDIKKAMGSNPETVYLEFARETQTSRLTNSRLNRVQEIYNSPELKTEFAYLAKKLEAETKESIHDDRLYLYYLQEGRDMYTGKEIPFDQISSNYDIDHIIPQAFTKDDSLDNRVLVNRATNARKSNSPTFTNDIIDNRKSWWQSLVKRGLMSKEKFERLTDKRKTFSENQTNHFIARQLVETRQIIKNVADLIKNNYDGTQAVAIRASLTGEMRRYLDWPKNRDMNDYHHAHDALMMATVGKYVDRRGFFDNGSVSDGAGNAYNLYTKDWLVAARVGTRNDSQRVNPYGFIVGSMNSKAVRQQVNKETGEIVWGNENLDYLRHVLSYKKILVTRRLSGSSGRLYAETLFSPNPKAKLIAQKANRSVALYGGFTKAESAYTALVEFNKKGDRSYKLIKVPMAIANRVNDKQITVTAYIASLNLRDFSRVVLEHLPLGTLIRESDGSEFYAASSEYKHNAKELWAPKEILRSSKKLDKATADNLIDIFDFLTNDKTISNFKFYEKDLLHLKNVRDKFVEASDEIKIKVLSDVIYELHNDAGWRDPFKHIQEKPAWTMLQVKGGIKLSEKAAIVYQSPTGLFETITIVGE

SEQ ID NO: 524 - protein, 883 aa, Leuconostoc pseudomesenteroides
MIGVRLFEGADTAAERRGYRTTRRRLSRRRWRLRLLNDIFASELSKIDENFLPRLKYSWVNKNDTDNVHFGVGVFDNSEQEKAFYQDYPTIYHLRQKLMTDNRQHDLREVYLAIHHIVKYRGHFLNSGEISANSSFDAQKFLELLREFDNTFYPDAVKFLNLDQLDLPDKISSEISDSKISKSERVDRVLQHVQLANSGAKKILKAILNAVVGNSVDSVAMFSLSDLDKEEKKKINHPVTDSKPFKYSDKEVEAKLDELSNLLQDEQKIEFLSLLKLSFDGLTLKMLLGNAKSVSEAMVERYKVHKDDLKFIKENILNSFSKDKKKEFDKYYEAHLAEKDVDNVDKYFKKIIDDSIISKDKKIELLQKIDDHDFLPSQRSKINGAIPHQLHRNELDKIISQQSKYYPFLADSYTQNGKTETKLAGLVNFRVPYYVGPLVSKENADRNNPDGGQNHWVEFKENTSLSNLTPWNFNEIVDKDKSAAKFIERLTGMDTYLIGEPTLPQNSLLYQKYNVLQELNNIRVDNHKLDVKIKQDVFEHLFKTQNSVSAKDVKNYLIANGYAAPSIQITGLSDTNEKTFNSKLSSYNYLVDKLGRTFVESVKSDVLEKIIELQTVFEDKTVLLRQLSMISELTLAQANQLAEKHWTGWGRLSRKLLSSKVVDVNKITNSTFYPATSRQTIIDTLYHTQLNLMEIINNAEDLYGVRQWISEQNKSDSSDTNDVYDQIQELAGDKKIKRGITQSFRILDDIVKAMGGEPERVYLEFARENQQSGVSFSRKNLLSKLYENDSLKQTFKELKSQLESETKENLQNDRLYLYYLQQGRDMYSNDELNIDQLSSYDIDHIIPQAYTKDNSFDNRVLVSSKANRLKRMLLWYPVKLSKK

SEQ ID NO: 525 - protein, 468 aa, Leuconostoc pseudomesenteroides
MKDQGFISKRKFENLTRRGDFSEQQKERFIARALVETRQIIVNVSSLIDSHFNHTKAVAVKSNMTTDMRHYTKVPKNRDINDYHHAHDALFVATVGQYIENKGFMKAGKLSDSVGNEYNRYTKKWIETARKNTNYGRVNPFGFVVGSMQTATRGKLDYETGELKVVKNNYWSKDDLDYLLKVVSYKKILVTTKLQDNKGAMYDANLISAKGSGKKKAQLQISKSKNIDLYGGFNKLQNEYSVLILNHDEYRWLSIPMYARNSSEQYLHDKYPDAKVILNHILVGQPILLSNSSDPQKSKFASLRIATGGDYHNNFEFVPSVDVKKILDNIYLNHSVTDDEYKKVFESLLATLHDKFVFGIHQVMYNKIFDNKYLFDKMPDEAKRNVINSLLKFMNISKNQLGAVGKIGGKVNGVLYGFKTETEKGTSAGQLISNGKMQPHDIFIFQSPTGIFERRVTVAELANVIKDE

SEQ ID NO: 526 - protein, 1103 aa, Listeria innocua
LKLYPGEKSTGMFAQFISLIVGSKGNFQKPFDLIEKSDIECAKDSYEEDLESLLALIGDEYAELFVAAKNAYSAVVLSSIITVAETETNAKLSASMIERFDTHEEDLGELKAFIKLHLPKHYEEIFSNTEKHGYAGYIDGKTKQADFYKYMKTTLENIEGADYFIAKIEKENFLRKQRTFDNGAIPHQLHLEELEAILHQQAKYYPFLKENYDKIKSLVTFRIPYFVGPLANGQSEFAWLTRKADGEIRPWNIEEKVDFGKSAVDFIEKMTNKDTYLPKENVLPKHSLCYQKYLVYNELTKVRYINDQGKTSYFSGQEKEQIFNDLFKQKRKVKKKDLELFLRNMSHVESPTIEGLEDSFNSSYSTYHDLLKVGIKQEILDNPVNTEMLENIVKILTVFEDKRMIKEQLQQFSDVLDGVVLKKLERRHYTGWGRLSAKLLMGIRDKQSHLTILDYLMNDDGLNRNLMQLINDSNLSFKSIIEKEQVTTADKDIQSIVADLAGSPAIKKGILQSLKIVDELVSVMGYPPQTIVVEMARENQTTGKGKNNSRPRYKSLEKAIKEFGSQILKEHPTDNQELKNNRLYLYYLQNGKDMYTGQDLDIHNLSNYDIDHIVPQSFITDNSIDNLVLTSSAGNREKGNDVPPLEIVQKRKVFWEKLYQGNLMSKRKFDYLTKAERGGLTEADKARFIHRQLVETRQITKNVANILHQRFNYGKDDHGNTMKQVRIVTLKSALVSQFRKQFQLYKVRGVNDYHHAHDAYLNGVVANTLLKVYPQLEPEFVYGDYHQFDWFKANKATAKKQFYTNIMLFFAQKDRIIDENGEILWDKKYLDTVKKVMSYRQMNIVKKTEIQKGEFSKATIKPKGNSSKLIPRKTNWDPMKYGGLDSPNMAYAVVIEYAKGKNKLVFEKKIIRVTIMERKAFEKDEKAFLEEQGYRQPKVLAKLPKYTLYECEEGRRRMLASANEAQKGNQQVLPNHLVTLLHHAANCEVSDGKSLDYIESNREMFAELLAHVSEFAKRYTLAEANLNKINQLFEQNKEGDIKAIAQSFVDLMAFNAMGAPASFKFFETTIERKRYNNLKELLNSTIIYQSITGLYESRKRLDD

SEQ ID NO: 527 - protein, 1337 aa, Listeria innocua
MKNMKKPYTIGLDIGTNSVGWAVLTDQYDLVKRKMKIAGDSEKKQIKKNFWGVRLFDEGQTAADRRMARTARRRIERRRNRISYLQGIFAEEMSKTDANFFCRLSDSFYVDNEKRNSRHPFFATIEEEVEYHKNYPTIYHLREELVNSSEKADLRLVYLALAHIIKYRGNFLIEGALDTQNTSVDGIYKQFIQTYNQVFASGIEDGSLKKLEDNKDVAKILVEKVTRKEKLERILKLYPGEKSAGMFAQFISLIVGSKGNFQKPFDLIEKSDIECAKDSYEEDLESLLALIGDEYAELFVAAKNAYSAVVLSSIITVAETETNAKLSASMIERFDTHEEDLGELKAFIKLHLPKHYEEIFSNTEKHGYAGYIDGKTKQADFYKYMKMTLENIEGADYFIAKIEKENFLRKQRTFDNGAIPHQLHLEELEAILHQQAKYYPFLKENYDKIKSLVTFRIPYFVGPLANGQSEFAWLTRKADGEIRPWNIEEKVDFGKSAVDFIEKMTNKDTYLPKENVLPKHSLCYQKYLVYNELTKVRYINDQGKTSYFSGQEKEQIFNDLFKQKRKVKKKDLELFLRNMSHVESPTIEGLEDSFNSSYSTYHDLLKVGIKQEILDNPVNTEMLENIVKILTVFEDKRMIKEQLQQFSDVLDGVVLKKLERRHYTGWGRLSAKLLMGIRDKQSHLTILDYLMNDDGLNRNLMQLINDSNLSFKSIIEKEQVTTADKDIQSIVADLAGSPAIKKGILQSLKIVDELVSVMGYPPQTIVVEMARENQTTGKGKNNSRPRYKSLEKAIKEFGSQILKEHPTDNQELRNNRLYLYYLQNGKDMYTGQDLDIHNLSNYDIDHIVPQSFITDNSIDNLVLTSSAGNREKGDDVPPLEIVRKRKVFWEKLYQGNLMSKRKFDYLTKAERGGLTEADKARFIHRQLVETRQITKNVANILHQRFNYEKDDHGNTMKQVRIVTLKSALVSQFRKQFQLYKVRDVNDYHHAHDAYLNGVVANTLLKVYPQLEPEFVYGDYHQFDWFKANKATAKKQFYTNIMLFFAQKDRIIDENGEILWDKKYLDTVKKVMSYRQMNIVKKTEIQKGEFSKATIKPKGNSSKLISRKTNWDPMKYGGLDSPNMAYAVVIEYAKGKNKLVFEKKIIRVTIMERKAFEKDEKAFLEEQGYRQPKVLAKLPKYTLYECEEGRRRMLASANEAQKGNQQVLPNHLVTLLHHVANCEVSDGKSLDYIESNREMFAELLAHVSEFAKRYTLAEANLNKINQLFEQNKEGDIKAIAQSFVDLMAFNAMGAPASFKFFETTIERKRYNNLKELLNSTIIYQSITGLYESRKRLDD

SEQ ID NO: 528 - protein, 953 aa, Listeria ivanovii
MKKMLANIDGADYFIDQIEEENFLRKQRTFDNGTIPHQLHLEELEAILHQQAKYYPFLRKDYEKIRSLVTFRIPYFIGPLANGQSDFAWLTRKADGEIRPWNIEEKVDFGKSAIDFIEKMTNKDTYLPKENVLPKHSLCYQKYMVYNELTKIRYIDDQGKTHHFSGQEKQQIFNGLFKQQRKVKKKDLERFLYTINHIESPTIEGVEDAFNSSFATYHDLQKGGVTQEILDNPLNADMLEEIVKILTVFEDKRMIKEQLQSFSDVLDGTILKKLERRHYTGWGRLSAKLLTGIRDKHSHLTILDYLMNDDGLNRNLMQLINDSNLSFKSIIEKEQVSTADKGIQSIVAELAGSPAIKKGILQSLKIVDELVGIMGYPPQTIVVEMARENQTTGKGKNNSKPRFISLEKAIKEFGSQILKEHPTDNQCLKNDRLYLYYLQNGKDMYTGKELDIHNLSNYDIDHIIPQSFITDNSIDNRVLVSSTANREKGDNVPLLEVVRKRKAFWEKLYQAKLMSKRKFDYLTKAERGGLTEADKANFIQRQLVETRQITKNVANILYQRFNCKQDENGNEVEQVRIVTLKSTLVSQFRKQFQLYKVREVNDYHHAHDAYLNGVVANTLLKVYPQLEPEFVYGDYHQFDWFKANKATAKKQFYTNIMRFFAKENQIIDKNGEILWDNRYLDTIKKVLSYRQMNIVKKTEIQKGEFSNATVNPKGNSSKLISRKADWNPIKYGGFDGSNMAYSIVIEYEKRKKKTVIKKELIQINIMERVAFEKDQKAFLEEKGYYSPKVLTKIPKYTLYECENGRRRMLGSANEAQKGNQMVLPNHLMTLLYHAKNCEANDGESLAYIEMHREMFAELLAYISEFAKRYTLANDRLEKINMFFEQNKKGDIKVIAKSFDKLKVFNAFGAPRDFEFFETTIKRKRYYNIKELLNATIIYQSITGLYEARKRLED

SEQ ID NO: 529 - protein, 232 aa, Listeria ivanovii
MMSKLILGLDIGISSVGWGVLDESTNEVVDAGVRLFEEATRNGNEDRRGFRSARRLKRRRQHRLERAKGLIENNGFSCTDINKFNPYQARYNAIFGEVTKDELAAALFHLVKRRGTTIDAPEEEVKDVENELSTKMQLEKNAKKLATKYDYICEIQLEKLKENKVVRDHENRFRTEDYVKEARAILENQQEYYPEVTNEFIESYMALIETRRMYYDGPGSEKSPTPYGQYFI

SEQ ID NO: 530 - protein, 300 aa, Listeria monocytogenes
DDGLNRNLMQLINDSNLSFKSIIEKEQVSTTDKDLQSIVADLAGSPAIKKGILQSLKIVDELVSIMGYPPQTIVVEMARENQTTVKGKNNSRPRYKSLEKAIKEFGSQILKEHPTDNQELRNNRLYLYYLQNGKDMYTGQELDIHNLSNYDIDHIVPQSFITDNSIDNLVLTSSAGNREKGDDVPPLEIVRKRKVFWEKLFQGNLMSKRKFDYLTKAERGGLTEADKATFIHRQLVETRQITKNVANILHQRFNNETDNHGNNMEQVRIVMLKSALVSQFRKQFQLYKVREVNDYHHAHD

SEQ ID NO: 531 - protein, 782 aa, Listeria monocytogenes
  misc_feature (722)..(722): Xaa can be any naturally occurring amino acid
IFNDLFKQKRKVKKKDLELFLRNINQIESPTIEGLEDSFNASYATYHDLLKVGMKQEILDNPLNTEMLEDIVKILTVFEDKRMIKEQLQQFSDVLDGVVLKKLERRHYTGWGRLSAKLLVGIRDKQSHLTILEYLMNDDGLNRNLMQLINDSNLSFKSIIEKEQVSTTDKDLQSIVADLAGSPAIKKGILQSLKIVDELVSIMGYPPQTIVVEMARENQTTVKGKNNSRPRYKSLEKAIKEFGSQILKEHPTDNQELKNNRLYLYYLQNGKDIYTGQELDIHNLSNYDIDHIVPQSFITDNSIDNLVLTSSAGNREKGDDVPPLEIVRKRKVFWEKLYQGNLMSKRKFDYLTKAERGGLTEADKARFIHRQLVETRQITKNVANILHQRFNNETDNHGNTMEQVRIVTLKSALVSQFRKQFQLYKVREVNDYHHAHDAYLNGVVANTLLKVYPQLEPEFVYGEYHQFDWFKANKATAKKQFYTNIMLFFAQKERIIDENGEILWDKKYLETIKKVLDYRQMNIVKKTEIQKGEFSKATIKPKGNSSKLIPRKENWDPMKYGGLDSPNMAYAVIIEHAKGKKKIVIEKKLIQINIMERKMFEKDEEAFLEEKGYRHPKVLTKLPKYTLYECEKGRRRMLASANEAQKGNQLVLSNHLVSLLYHAKNCEASDGKSLKYTEAHRETFSELLAQVSEFATRYTLADANLSKINNLFEQNKEGDIKXIAQSFVDLMVFNAMGAPASFKFFEATIDRKRYTNLKELLSSTIIYQSITGLYESRKRLDD

SEQ ID NO: 532 - protein, 1334 aa, Listeria monocytogenes; identical to SEQ ID NO: 114

SEQ ID NO: 533 - protein, 1334 aa, Listeria monocytogenes
MKNPYTIGLDIGTNSVGWAVLTDQYDLVKRKMKVAGNSDKKQIKKNFWGVRLFDDGQTAVDRRMNRTARRRIERRRNRISYLQEIFAVEMANIDANFFCRLNDSFYVDSEKRNSRHPFFATIEEEVAYHKNYRTIYHLREELVNSSEKADLRLVYLALAHIIKYRGNFLIEGALDTKNTSVDEVYKQFIQTYNQVFMSNIEEGALAKVEENTEVASILAGKFTRREKFERILRLYPGEKSTGMFAQFISLIVGNKGNFQKVFNLVEKTDIECAKDSYEEDLEALLAIIGDEYAELFVAAKNTYNAVVLSSIITVTATETNAKLSASMIERFDAHEKELGELKAFIKLHLPKQYQEIFNNAEIDGYAGYIDGKTKQVDFYKYLKTTLENVEGADYFITKIEEENFLRKQRTFDNGVIPHQLHLEELEAILHQQAKYYPFLREGYDKIKSLVTFRIPYFVGPLANGQSEFAWLTRKDDGEIRPWNIEEKVDFGKSAVDFIEKMTNKDTYLPKENVLPKHSLCYQKYMVYNELTKIRYIDDQGKTNYFSGREKQQIFNDLFKQKRKVKKKDLELFLRNINHIESPTIEGLEDSFNASYATYHDLLKVGLKQEILDNPLNTEILEDIVKILTVFEDKRMIKEQLEQFSDVLDGVVLKKLERRHYTGWGRLSAKLLVGIRDKQSHLTILDYLMNDDGLNRNLMQLINDSNLSFKSIIEKEQVSTTDKDLQSIVADLAGSPAIKKGILQSLKIVDELVSIMGYPPQTIVVEMARENQTTGKGKNNSKPRYKSLEKAIKDFGSQILKEHPTDNQELKNNRLYLYYLQNGKDIYTGQELDIHNLSNYDIDHIVPQSFITDNSIDNLVLTSSAGNREKGGDVPPLEIVRKRKVFWEKLYQGNLMSKRKFDYLTKAERGGLTEADKARFIHRQLVETRQITKNVANILHQRFNKETDNHGNTMEQVRIVTLKSALVSQFRKQFQLYKVREVNDYHHAHDAYLNGVVANTLLKVYPQLEPEFVYGEYHQFDWFKANKATAKKQFYTNIMLFFAQKERIIDENGEILWDKKYLETIKKVLDYRQINIVKKTEIQKGEFSKATIKPKGNSSKLIPRKENWDPMKYGGLDSPNMAYAVIIEHAKGKKKIVIEKKLIQINIMERKMFEKDEEAFLEEKGYHQPKVLTKLPKYTLYECEKGRRRMLSSANEAQKGNQLVLSNHLVSLLYHAKNCEASDGKSLKYIEAHRETFSELLAQVSEFATKYTLADANLSKINNLFEQNKEGDIKAIAQSFVDLMAFNAMGAPASFKFFEATIDRKRYTNLKELLSSTIIYQSITGLYESRKRLDD

SEQ ID NO: 534 - protein, 1334 aa, Listeria monocytogenes
MKNPYTIGLDIGTNSVGWAVLTDQYDLVKRKMKVAGNSDKKQIKKNFWGVRLFDDGQTAVDRRMNRTARRRIERRRNRISYLQEIFAVEMANIDANFFCRLNDSFYVDSEKRNSRHPFFATIEEEVAYHKNYRTIYHLREELVNSSEKADLRLVYLALAHIIKYRGNFLIEGALDTKNTSVDEVYKQFIQTYNQVFMSNIEEGALAKVEENTEVASILAGKFTRREKFERILRLYPGEKSTGMFAQFISLIVGNKGNFQKVFNLVEKTDIECAKDSYEEDLEALLAIIGDEYAELFVAAKNTYNAVVLSSIITVTATETNAKLSASMIERFDAHEKELGELKAFIKLHLPKQYQEIFNNAEIDGYAGYIDGKTKQVDFYKYLKTTLENVEGADYFITKIEEENFLRKQRTFDNGVIPHQLHLEELEAILHQQAKYYPFLREGYDKIKSLVTFRIPYFVGPLANGQSEFAWLTRKDDGEIRPWNIEEKVDFGKSAVDFIEKMTNKDTYLPKENVLPKHSLCYQKYMVYNELTKIRYIDDQGKTNYFSGREKQQIFNDLFKQKRKVKKKDLELFLRNINHIESPTIEGLEDSFNASYATYHDLLKVGLKQEILDNPLNTEILEDIVKILTVFEDKRMIKEQLEQFSDVLDGVVLKKLERRHYTGWGRLSAKLLVGIRDKQSHLTILDYLMNDDGLNRNLMQLINDSNLSFKSIIEKEQVSTTDKDLQSIVADLAGSPAIKKGILQSLKIVDELVSIMGYPPQTIVVEMARENQTTGKGKNNSKPRYKSLEKAIKDFGSQILKEHPTDNQELKNNRLYLYYLQNGKDIYTGQELDIHNLSNYDIDHIVPQSFITDNSIDNLVLTSSAGNREKGGDVPPLEIVRKRKVFWEKLYQGNLMSKRKFDYLTKAERGGLTEADKARFIHRQLVETRQITKNVANILHQRFNKETDNHGNTMEQVRIVTLKSALVSQFRKQFQLYKVREVNDYHHAHDAYLNGVVANTLLKVYPQLEPEFVYGEYHQFDWFKANKATAKKQFYTNIMLFFAQKERIIDENGEILWDKKYLETIKKVLDYRQINIVKKTEIQKGEFSKATIKPKGNSSKLIPRKENWDPVKYGGLDSPNMAYAVIIEHAKGKKKIVIEKKLIQINIMERKMFEKDEEAFLEEKGYHQPKVLTKLPKYTLYECEKGRRRMLSSANEAQKGNQLVLSNHLVSLLYHAKNCEASDGKSLKYIEAHRETFSELLAQVSEFATKYTLADANLSKINNLFEQNKEGDIKAIAQSFVDLMAFNAMGAPASFKFFEATIDRKRYTNLKELLSSTIIYQSITGLYESRKRLDD

SEQ ID NO: 535 - protein, 1099 aa, Listeria monocytogenes
MKNPYTIGLDIGTNSVGWAVLTDQYDLVKRKMKVAGNSDKKQIKKNFWGVRLFDDGQTAVDRRMNRTARRRIERRRNRISYLQEIFAVEMANIDANFFCRLNDSFYVDSEKRNSRHPFFATIEEEVAYHKNYRTIYHLREELVNSSEKADLRLVYLALAHIIKYRGNFLIEGALDTKNTSVDEVYKQFIQTYNQVFMSNIEEGALAKVEENTEVASILAGKFTRREKFERILRLYPGEKSTGMFAQFISLIVGNKGNFQKVFNLVEKTDIECAKDSYEEDLEALLAIIGDEYAELFVAAKNTYNAVVLSSIITVTATETNAKLSASMIERFDAHEKELGELKAFIKLHLPKQYQEIFNNAEIDGYAGYIDGKTKQVDFYKYLKTTLENVEGADYFITKIEEENFLRKQRTFDNGVIPHQLHLEELEAILHQQAKYYPFLREGYDKIKSLVTFRIPYFVGPLANGQSEFAWLTRKDDGEIRPWNIEEKVDFGKSAVDFIEKMTNKDTYLPKENVLPKHSLCYQKYMVYNELTKIRYIDDQGKTNYFSGREKQQIFNDLFKQKRKVKKKDLELFLRNINHIESPTIEGLEDSFNASYATYHDLLKVGLKQEILDNPLNTEILEDIVKILTVFEDKRMIKEQLEQFSDVLDGVVLKKLERRHYTGWGRLSAKLLVGIRDKQSHLTILDYLMNDDGLNRNLMQLINDSNLSFKSIIEKEQVSTTDKDLQSIVADLAGSPAIKKGILQSLKIVDELVSIMGYPPQTIVVEMARENQTTGKGKNNSKPRYKSLEKAIKDFGSQILKEHPTDNQELKNNRLYLYYLQNGKDIYTGQELDIHNLSNYDIDHIVPQSFITDNSIDNLVLTSSAGNREKGGDVPPLEIVRKRKVFWEKLYQGNLMSKRKFDYLTKAERGGLTEADKARFIHRQLVETRQITKNVANILHQRFNKETDNHGNTMEQVRIVTLKSALVSQFRKQFQLYKVREVNDYHHAHDAYLNGVVANTLLKVYPQLEPEFVYGEYHQFDWFKANKATAKKQFYTNIMLFFAQKERIIDENGEILWDKKYLETIKKVLDYRQINIVKKTEIQKGEFSKATIKPKGIPAN

SEQ ID NO: 536 - protein, 1334 aa, Listeria monocytogenes
MKNPYTIGLDIGTNSVGWAVLTDQYDLVKRKMKVAGNSDKKQIKKNFWGVRLFDEGETAADRRMNRTARRRIERRRNRISYLQEIFALEMANIDANFFCRLNDSFYVDSEKRNSRHPFFATIEEEVAYHKNYRTIYHLREELVNSSEKADLRLVYLALAHIIKYRGNFLIEGALDTKNTSVDGVYKQFIQTYNQVFISNIEEGTLAKMEENTTVADILAGKFTRKEKLERILQLYPGEKSTGMFAQFISLIVGSKGNFQKVFDLVEKTDIECAKDSYEEDLEALLAIIGDEYAELFVAAKNTYNAVVLSSIITVTDTETNAKLSASMIERFDAHEKDLSELKAFIKLHLPKQYEEIFSNVAIDGYAGYIDGKTKQVDFYKYLKTLLENIEGADYFIAKIEEENFLRKQRTFDNGAIPHQLHLEELEAILHQQAKYYPFLKEAYDKIKSLVTFRIPYFVGPLANGQSDFAWLTRKADGEIRPWNIEEKVDFGKSAVDFIEKMTNKDTYLPKENVLPKHSLYYQKYMVYNELTKVRYIDDQGKTNYFSGQEKQQIFNDYFKQKRKVSKKDLEQFLRNMSHIESPTIEGLEDSFNSSYATYHDLLKVGIKQEVLENPLNTEMLEDIVKILTVFEDKRMIKEQLQQFSDVLDGAVLKKLERRHYTGWGRLSAKLLVGIRDKQSHLTILDYLMNDDGLNRNLMQLINDSNLSFKSIIEKEQVSTTDKDLQSIVADLAGSPAIKKGILQSLKIVDELVSIMGYPPQTIVVEMARENQTTVKGKNNSRPRYKSLEKAIKEFGSQILKEHPTDNQELRNNRLYLYYLQNGKDMYTGQELDIHNLSNYDIDHIVPQSFITDNSIDNLVLTSSAGNREKGDDVPPLEIVRKRKVFWEKLFQGNLMSKRKFDYLTKAERGGLTEADKATFIHRQLVETRQITKNVANILHQRFNNETDNHGNNMEQVRIVMLKSALVSQFRKQFQLYKVREVNDYHHAHDAYLNGVVANTLLKVYPQLEPEFVYGEYHQFDWFKANKATAKKQFYTNIMLFFAQKERIIDENGEILWDKKYLETIKKVLDYRQMNIVKKTEIQKGEFSKATIKPKGNSSKLIPRKENWDPMKYGGLDSPNMAYAVIIEHAKGKKKVVFEKKIIRITIMERKAFEKDEKSFLEKQGYRQPKVLTKLPKYTLYECENGRRRMLASANEAQKGNQQVLKGQLITLLHHAKNCEASDGKSLDYIESNREMFGELLAHVSEFAKRYTLADANLSKINQLFEQNKDNDIKVIAQSFVNLMAFNAMGAPASFKFFEATIERKRYTNLKELLSATIIYQSITGLYEARKRLDG

SEQ ID NO: 537 - protein, 1334 aa, Listeria monocytogenes
MKNPYTIGLDIGTNSVGWAVLTNQYDLVKRKMKVAGNSDKKQIKKNFWGVRLFDDGQTAVDRRMNRTARRRIERRRNRISYLQEIFAVEMANIDANFFCRLNDSFYVDSEKRNSRHPFFATIEEEVAYHKNYRTIYHLREELVNSSEKADLRLVYLALAHIIKYRGNFLIEGALDTKNTSVDGVYEQFIQTYNQVFMSNIEEGTLAKVEENIEVANILAGKFTRREKFERILQLYPGEKSTGMFAQFISLIVGSKGNFQKVFDLIEKTDIECAKDSYEEDLEALLAIIGDEYAELFVAAKNTYNAVVLSSIITVTATETNAKLSASMIERFDAHEKDLGELKAFIKLHLPKQYQEIFNNAAIDGYAGYIDGKTKQVDFYKYLKTILENIEGADYFIAKIEEENFLRKQRTFDNGAIPHQLHLEELEAIIHQQAKYYPFLREDYEKIKSLVTFRIPYFVGPLAKGQSEFAWLTRKADGEIRPWNIEEKVDFGKSAVDFIEKMTNKDTYLPKENVLPKHSLCYQKYMVYNELTKVRYIDDQGKTNYFSGQEKQQIFNDLFKQKRKVKKKDLELFLRNINHIESPTIEGLEDSFNASYATYHDLLKVGMKQEILDNPLNTEMLEDIVKILTVFEDKPMIKEQLQQFSDVLDGGVLKKLERRHYTGWGRLSAKLLVGIREKQSHLTILDYLMNDDGLNRNLMQLINDSNLSFKSIIEKEQVSTTDKDLQSIVADLAGSPAIKKGILQSLKIVDELVSIMGYPPQTIVVEMARENQTTGKGKNNSKPRYKSLEKAIKEFGSKILKEHPTDNQELKNNRLYLYYLQNGKDMYTGQELDIHNLSNYDIDHIVPQSFITDNSIDNLVLTSSAGNREKGGDVPPLEIVRKRKVFWEKLYQGNLMSKRKFDYLTKAERGGLTDADKARFIHRQLVETRQITKNVANILHQRFNNETDNHGNTMEQVRIVTLKSALVSQFRKQFQLYKVREVNDYHHAHDAYLNGVVANTLLKVYPQLEPEFVYGEYHQFDWFKANKATAKKQFYTNIMLFFGQKERIIDENGEILWDKKYLETIKKVLDYRQMNIVKKTEIQKGEFSKATIKPKGNSSKLIPRKENWDPMKYGGLDSPNMAYAVIIEHAKGKKKLIFEKKIIRITIMERKMFEKDEEAFLEEKGYRHPKVLTKLPKYTLYECEKGRRRMLASANEAQKGNQLVLSNHLVSLLYHAKNCEASDGKSLKYIEAHRETFSELLAQVSEFATRYTLADANLSKINNLFEQNKEGDIQAIAQSFVDLMAFNAMGAPASFKFFEATIDRKRYTNLKELLSSTIIYQSITGLYESRKRLDD

SEQ ID NO: 538 - protein, 874 aa, Listeria seeligeri; identical to SEQ ID NO: 180

SEQ ID NO: 539 - protein, 1087 aa, Listeriaceae bacterium
MKKLVLGLDIGVASVGWGIIDAENGDVVDTGVRLFSSRDASENESRRTSRQSRRLSRRKKHRRERIKQLLLAHDMDICDIVNENPYELRVKGLNEKLEVSEIYVALTHLAKRRGVSYLDDVVEEGGTIKSEHLNKNMEEIKSGKMPCEIQLERFEKYGQVRGMIEINQDTEESSFLVNIFRTSDYIKEAKTILATQQKFHKQITNEFIDEYIHIMASKRDYFIGPGNEKSRTDYGVYRTNGDTWDNLFEILIGKCSVFPEETRAARSSYVAQEFNLLNDLNNLKISNLESGKLSASQKHDIVEKVKNSKKFGTKDLLKYIASVCECKIEDIGGCRVDKNRKPIMHTFENYRKVHNALNEAGVDLRLSETDYDELMKIMTLNSETLEIKKQCKEKLPQLTEDYLNVCLVLNKKGAFSGWHALSLKAMKLMMPELYGTSKNQMQIIHTMQLGKAYLKPLNQQKYLNSEAILEEIYNPIAARSIRQTIKVTNAILKKYGHLDSVIIEMPRDYQTSEDERKMIEKMQKENEKEKKAALKRAREEYPFPDEAFRNHKELATKLRLWYQQDQFCVYSGRKISVVDLVRNPNQFEIDHIIPQSVSLDDSLNNKVLCFSEENQKKGQQTPFYYHKGKSGNWTYEQYKLFVEKLFDKKKISNKKRELLLFEEDINKWDVRRGFIARNLVDTRYASRVILNSYQQYFGNHEMGTKVKVVRGKFTSQLRKKWRIFKDRNESHSHHAIDALIVAATANLRLWKKNTLGVSDEGKVYDKETGEILPFEKLTESEYNEMMNKEPYLNFKTKLQNIETKVKYSYRVSKKVNRKISDATIYSTRERDGIDYIVGKIKNIYDVKTYKDQFLKRYKKNKEQFLMYQHDPQTFAILENIMATYQDAENPFLAYKKEYGVIRKYSKKGGGSPVTSLKFIDKVLGQKIDLTAKNQAALPKNKKVVLQSITPYRADVYYDEIDKRYHLIGVKYSLFSFSKQGYVINPIAYQKLLEKEQIHSEMKFCFSLYREDIIEFGEDPDSLTRYRFWSKNESGKNKIEVKPIEKPNFEKQTVLTITKKIKILNKYQTDVLGNSFKAQEEKDPRNIE

SEQ ID NO: 540 - protein, 1345 aa, Marinilabilia sp.
MKKILGLDLGTTSIGWAFIKEPEKDVVGSEIVDMGVRIVALSSDEENDFAKGNTISINADRTLKRGARRNLQRFKLRRDALLEIFKEMKLIPSNFKYAEDGPSSTFSTLKLRDKAAKEKIELDDLVKVLLQINKKRGYRSSRKAKSEEDDGSAIDSMGIAKELYENDLTPGQWVFEALQKGRKNVPDFYRSDLQEEFKKIVNYQSEFYPDVLNSSFVEDWMGKASTPTKQYFNKKGVHLAENKGKREERRLQEYNWRAVAVNSKIDLSEIALILSQINSQISNSSGYLGAISDRSKELYFKNQTVGQYLYQQIKINPHTRLKGQVFYRQDYLDEFEKIWSVQSGFHPQLNDALKKEIRDITIFFQRRLKSQKHLISNCEFEDYHKVVPKSHPIFQEFRIWQNLNNLTLIKKDNLNEKSELALEDKIALANELAFKREQSVKDALNILGLKSSEWEFNFTKIEGNRTNHAFFEAFAKIIEIEDGEPLDLGNLKADDILDQFSEAFLRIGIDPGLLQVNNDIEGPNYEKQPYIQFWHLLYSSEDDQKLKQNLIKKFGFKPDHAKILASISLQDDHASLSSRAIKKILPHLQSGLIYDKACTYAGYNHSSSFTKEENEKRELSSELDLLKKNSLRNPVVEKILNQMINVVNAILKDPNLGKPDEIRVEMARELKANAEQRKNMTSNIASATRDHEKYREILKKEFGLKRVTKNDLLRYKLWLETDGISLYTGKPIEASKLFSKEYDIEHIIPKTRLFDDSFSNKTICERQLNIDKANVTAFSFLQNKLSGDEFEQYQSRVKSLFGKLSKAKIQKLLMANDKIPEDFIARQLQETRYISKKAKEILFEITRRVSVTTGTITDKLREDWGLVEIMKELNWEKYDKLGLTYTIEGKHGERLNKIKDWSKRNDHRHHAMDALTVALTKPAYIQYLNNLNAKELNGKKSTEIFAIEQKYLKRENGKLCFIPPVENIRTEAKKHLSKVLISYKAKNKVVTINKNRTNKKAGFNEQIALTPRGQLHKETVYGKAFHYSTKFEKIGASFDVQKINAVAKKEEREALLKRLAENGDDPKKAFTGKNSLSKMPIYLDLKRNIKLPEKVKTVVLEQNYTIRKNIDPDLKLDKVIDVGVKRILENRLKEFGGNAKLALSNLDENPIWLNKEKGITIKRVKISGVSNVESLHVKKDHFGEPILDQVGNEIPVDFVSTGNNHHVAIYEDEKGNLQEEVVSFFEAVVRQNQGLPIINKNHSLGWKFLFTLKQNEYFVFPSDDFDPTDVDLMDEENYHLISPNLFRVQKFTTKDYFFRHHLETTVEDKSELKGVSFKRLGLPGLNCIKKIRINHLGKIIQVGEY

SEQ ID NO: 541 - protein, 1091 aa, Mobiluncus mulieris
MDSRKYRVGIDVGTNSVGFAAVEEDDSGSPTRFLNTMVVIHDSGVDSEQKKYAITRLASAGTARRTRRLYRTRRQRLRELDDFISNELGYPLVNLENFADPYEPWKVRADLATTKLPNDELPEAMSIALRHMARHRGWRSPYQRVEALHLHAEISKEFAALKERVVEKTGDVFSDDATPAEVLVDLMGRQKVRGADGVLSGKLRQSDNANELRKIASVQGIDDETLNRIIDRVFSSKSPKGKASERVGMDALPGQGSKPRALKAMPSFQKFRVVSVICNLRIKDSGGDARPLSMEEKEKLIDYLMSSTTDDHVTWTDVADLLHVKRSQLQGTAKEGFDGERPYTRPPVNSTWSKIKDSKIKSLVALWKTGDVDVQSAIVEALSNASVLEDSRPGADIVVAYLESLDDKELESLDKVGLPAGRASYSEDSLERLTERMLRDDCDLFEARKREFNVADDWKPPADPIYAPVGNPGVDRVLKIVNRLLMAAEREWGAPTQINIEHVRSGFSSELMQREFERENERRRAQNEEAVKAILTEKGGNSRVSKYDITRYYAVKRQHCQCLYCGTPITFSDCELDHIVPRKGVGSTNTRVNLAAACRSCNRDKSNLPFAVWAGKASNFDVSIDDAVSRVKQWQRSQNEGVREFRAFQNEVISRLLKTTEDPEIDSRSLESVAWMARELHHRVEYYFQSKGAQTQVSVYRGAVTAQARKSSGLEDKVKMIGGGGKTRLDRRHHAMDAATIALMTPGISTTLSEKNNLRDAQKFTGQSETWKDYCGRTETARKHFAVWKSNMERLTDLFNDKLENDAIPVVQPLRLRLSNSKAHDDGIGKLDSKKLGSVWSLADIDRAATPQIWTALTRCDDFDPTKGLPENANRVIRAQGVKYESEDNIPVFPSNVAAIAVRDGYAEIGSTIHHARIYRIDDGKKTFYSMIRVFAVDLLKHQAEDLFTVKLPPSAISIRTCEDSLRRALSNGTAEYLGWLVPGDEIIVDTSDKAFHTGQIGDLLRNFPVNSFRLTGFPSNSRLRLKPVLLAGEGLRDDAEDSIKKILLGQGWRPAINVLFSKGKPRIVRRNSLGIERPSSNNGLPFSWEA

SEQ ID NO: 542 - protein, 1233 aa, Mycoplasma canis
MEKKRKVTLGFDLGIASIGWAIVDSETNQVYKLGSRLFDAPDTNLERRTQRGTRRLLRRRKYRNQKFYNLVKRTEVFGLSSREAIENRFRELSIKYPNIIELKTKALSQEVCPDEIAWILHDYLKNRGYFYDEKETKEDFDQQTVESMPSYKLNEFYKKYGYFKGALSQPTESEMKDNKDLKEAFFFDFSNKEWLKEINYFFNVQKNILSETFIEEFKKIFSFTRDISKGPGSDNMPSPYGIFGEFGDNGQGGRYEHIWDKNIGKCSIFTNEQRAPKYLPSALIFNFLNELANIRLYSTDKKNIQPLWKLSSIDKLNILLNLFNLPISEKKKKLTNANINDIVKKESTKSIMLSVEDIDMIKDEWAGKEPNVYGVGLSGLNIEESAKENKFKFQDLKILNVLINLLDNVGIKFEFKDRNDIIKNLELLDNLYLFLIYQKESNNKDSSIDLFIAKNELLNIENLKLKLKEFLLGAGNEFENHNSKTHSLSKKAIDAILPKLLDNNEGWNLEAIKNYDEEIKSQIEDNSSLMAKQDKKYLNDNFLKDAILPPNVKVTFQQAILIFNKIIQKFSKDFEIDKVVIELAREMTQDQENDALKGIAKAQKSKKSLVEERLEANNIDKSVFNDKYEKLIYKIFLWISQDFKDPYTGAQISTNEIVNNKVEIDHIIPYSLCFDDSSANKVLVHKQSNQEKSNSLPYEYIKQGHSGWNWDEFTKYVKRVFVNNVDSILSKKERLKKSENLLTTSYDGYDKLGFLARNLNDTRYATILFRDQLNNYAEHHLIDNKKMFKVIAMNGAVTSFIRKNMSYDNKLRLKDRSDFSHHAYDAAIIALFSNKTKTLYNLIDPSLNGIISKRSEGYWVIEDRYTGEIKELKKEDWTSIKNNVQARKIAKEIEEYLIDLDDEVFFSRKTKRKTNRQLYNETIYGIAAKTDEDGITNYYKKEKFSILDDKDIYLRLLREREKFVINQSNPEVIDQIIEIIESYGKENNIPSRDEAINIKYTKNKINYNLYLKQYMRSLTKSLDQFSEEFINQMIANKTFVLYNPTKNTTRKIKFLRLVNDVKINDIRKNQVINKFNGKNNEPKAFYENINSLGAIVFKNSANNFKTLSINTQIAIFGDKNWDIEDFKTYNMEKIEKYKEIYGIDKTYNFHSFIFPGTILLDKQNKEFYYISSIQTVRDIIEIKFLNKIEFKDENKNPDTSKTPKRLMFGIKSIMNNYEQVDISPFGINKKIFE

SEQ ID NO: 543 - protein, 1233 aa, Mycoplasma canis
MEKKRKVTLGFDLGIASVGWAIVDSETNQVYKLGSRLFDAPDTNLERRTQRGTRRLLRRRKYRNQKFYNLVKRTEVFGLSSREAIENRFRELSIKYPNIIELKTKALSQEVCPDEIAWILHDYLKNRGYFYDEKETKEDFDQQTIESMPSYKLNEFYKKYGYFKGALSQPTESEMKDNKDLKEAFFFDFSNKEWLKEINYFFNVQKNILSETFIEEFKKIFSFTRDISKGPGSDNMPSPYGIFGEFGDNGQGGRYEHIWDKNIGKCSIFTNEQRAPKYLPSALIFNFLNELANIRLYSTDKKNIQPLWKLSSIDKLNILLNLFNLPISEKKKKLTSANINDIVKKESTKSIMLSVEDIDMIKDEWAGKEPNVYGVGLSGLNIEESAKENKFKFQDLKILNVLINLLDNVGIKFEFKDRNDIIKNLELLDNLYLFLIYQKESNNKDSSIDLFIAKNESLNIENLKLKLKEFLLGAGNEFENHNSKTHSLSKKAIDAILPKLLDNNEGWNLEAIKNYDEEIKSQIEDNSFLMAKQDKKYLNDNFLKDAILPPNVKVTFQQAILIFNKIIQKFSKDFEIDKVVIELAREMTQDQENDALKGIAKAQKSKKSLVEERLEANNIDKSVFNEKYEKLIYKIFLWISQDFKDPYTGAKISANEIVDNKVEIDHIIPYSLCFDDSSANKVLVHKQSNQEKSNSLPYEYIKQGHSGWNWDEFTKYVKRVFVNNVDSILSKKERLKKSENLLTTSYDGYDKLGFLARNLNDTRYATILFRDQLNNYAEHHLIDDKKMFKVIAMNGAVTSFIRKNMSYDNKLRLKNRNDFSHHAYDAAIIALFSNKTKTLYNLIDPSLNGIISKRSEGYWVIEDRYTGEIKELKKEDWTSIKNNVQARKIAKEIEEYLIDLDDEVFFSRKTKRKTNRQLYNETIYGIAAKTDEDGITNYYKKEKLSILDDKDIYLRLLREREKFVINQSNPEVIDQIIEIIESYGKENNIPSRDEAINIKYTKNKINYNLYLKQYMRSLTKSLDQFSEEFINQMIANKTFVLYNPTKNTTRKIKFLRLVNDVKINDIRKNQVINKFNGKNNEPKAFYENINSLGAIVFKNSANNFKTLSINTQIAIFGDKNWDIEDFKTYNMEKIEKYKEIYGIDKTYNFHSFIFPGTILLDKQNKEFYYISSIQTVRDIIEIKFLNKIEFKDENKNQDTSKTPKRLMFGIKSIMNNYEQVDISPFGINKKIFE

SEQ ID NO: 544 - protein, 1233 aa, Mycoplasma canis; identical to SEQ ID NO: 247

SEQ ID NO: 545 - protein, 1233 aa, Mycoplasma canis
MEKKRKVTLGFDLGIASVGWAIVDSETNQVYKLGSRLFDAPDTNLERRTQRGTRRLLRRRKYRNQKFYNLVKRTEVFGLSSREAIENRFRELSIKYPNIIELKTKALSQEVCPDEIAWILHDYLKNRGYFYDEKETKEDFDQQTVESMPSYKLNEFYKKYGYFKGALSQPTESEMKDNKDLKEAFFFDFSNKEWLKEINYFFNVQKNILSETFIEEFKKIFSFTRDISKGPGSDNMPSPYGIFGEFGDNGQGGRYEHIWDKNIGKCSIFTNEQRAPKYLPSALIFNFLNELANIRLYSTDKKNIQPLWKLSSVDKLNILLNLFNLPISEKKKKLTSTNINDIVKKESIKSIMISVEDIDMIKDEWAGKEPNVYGVGLSGLNIEENAKENKFKFQDLKILNVLINLLDNVGIKFEFKDRNDIIKNLELLDNLYLFLIYQKESNNKDSSIDLFIAKNKSLNIENLKLKLKEFLLGAGNEFENHNSKSHSLSKKAIDAILPKLLDNNEGWNLEAIKNYDEEIKSQIEDNSSLMAKQDKKYLNDNFLKDAILPPNVKVTFQQAILIFNKIIQKFSKDFEIDKVVIELAREMTQDQENDALKGMAKAQKSKKSLVEERLEANNIDKSVFNDKYEKLIYKIFLWISQDFKDPYTGAQISVNEIVNNKVEIDHIIPYSLCFDDSSANKVLVHKQSNQEKSNSLPYEYIKQGHSGWNWDEFTKYVKRVFVNNVDSILSKKERLKKSENLLTTSYDGYDKLGFLARNLNDTRYATILFRDQLNNYAEHHLIDNKKMFKVIAMNGAVTSFIRKNMSYDNKLRLKDRSDFSHHAYDAAIIALFSNKTKTLYNLIDPSLNGIISKRSEGYWVIEDRYTGEIKELKKEDWTSIKNNVQARKIAKEIEEYLIDLDDEVFFSRKTKRKTNRQLYNETIYGIAAKTDEDGITNYYKKEKFSILDDKDIYLRLLREREKFVINQSNPEVIDQIIEIIESYGKENNIPSRDEAINIKYTKNKINYNLYLKQYMRSLTKSLDKFSEEFINQMIANKTFVLYNPTKNTTRKIKFLRLVNDVKINDIRKNQVINKFNGKNNEPKAFYENINSLGAIVFKNSANNFKTLSINTQIAIFGDKNWDIEDFKTYNMEKIEKYKEIYGIDKTYNFHSFIFPGTILLDKQNKEFYYISSIQTVRDIIEIKFLNKIEFKDENKNQDTSKTPKRLMFGIKSIMNNYEQVDISPFGINKKIFE

SEQ ID NO: 546 - protein, 1233 aa, Mycoplasma canis
MEKKRKVTLGFDLGIASVGWAIVDSETNQVYKLGSRLFDAPDTNLERRTQRGTRRLLRRRKYRNQKFYNLVKRTEVFGLSSREAIENRFRELSIKYPNIIELKTKALSQEVCPDEIAWILHDYLKNRGYFYDEKETKEDFDQQTVESMPSYKLNEFYKKYGYFKGALSQPTESEMKDNKDLKEAFFFDFSNKEWLKEINYFFNVQKNILSETFIEEFKKIFSFTRDISKGPGSDNMPSPYGIFGEFGDNGQGGRYEHIWDKNIGKCSIFTNEQRAPKYLPSALIFNFLNELANIRLYSTDKKNIQPLWKLSSVDKLNILLNLFNLPISEKKKKLTSTNINDIVKKESIKSIMLSVEDIDMIKYEWAGKEPNVYGVGLSGLNIEESAKENKFKFQDLKILNVLINLLDNVGIKFEFKDRNDIIKNLELLDNLYLFLIYQKESNNKDSSIDLFIAKNKSLNIENLKLKLKEFLLGAGNEFENHNSKTHSLSKKAIDAILPKLLDNNEGWNLEAIKNYDEEIKSQIEDNSSLMAKQDKKYLNDNFLKDAILPPNVKVTFQQAILIFNKIIQKFSKDFEIDKVVIELAREMTQDQENDALKGIAKAQKSKKSLVEERLEANNIDKSVFDDKYEKLIYKIFLWISQDFKDPYTGAKISANEIVNNKVEIDHIIPYSLCFDDSSANKVLVHKQSNQEKSNSLPYEYIKQGHSGWNWDEFTKYVKRVFVNNVDSILSKKERLKKSENLLTTSYDGYDKLGFLARNLNDTRYATILFRDQLNNYAEHHLIDNKKMFKVIAMNGAVTSFIRKNMSYDNKLRLKDRSDFSHHAYDAAIIALFSNKTKTLYNLIDPSLNGIISKRSEGYWVIEDRYTGEIKELKKEDWTSIKNNVQARKIAKEIEEYLIDLDDEVFFSRKTKRKTNRQLYNETIYGIAAKTDEDGITNYYKKEKFSILDDKDIYLRLLREREKFVINQSNPEVIDQIIEIIESYGKENNIPSRDEAINIKYTKNKINYNLYLKQYMRSLTKSLDQFSEEFINQMIANKTFVLYNPTKNTTRKIKFLRLVNDVKINDIRKNQVINKFNGKNNEPKAFYENINSLGAIVFKNSANNFKTLSINTQIAIFGDKNWDIEDFKTYNMEKIEKYKEIYGIDKTYNFHSFIFPGTILLDKQNKEFYYISSIQTVRDIIEIKFLNKIEFKDENKNQDTSKTPKRLMFGIKSIMNNYEQVDISPFGINKKIFE

SEQ ID NO: 547 - protein, 1239 aa, Mycoplasma cynos
MEEKRKVTLGFDLGVASVGWAIVDSETNEVYKLGSRLFDIPDTNIDRRAKRGSRRLVRRRSYRNQKFYNLIKRTKTFGFLDKEAIEKEFVLLSIKYPNIIELKVKGLQEEVSKSEAVWILHDYLKNRGYFYDDKEEKDDLENPSIESMPSYKLYEFYKEYGYFKGALSSPTESEKNKDSDLEKAIFFNFSNKEWTKEINHFFKIQKNIFSEDFKAKFMEFFSFIRDISKGPGSENMPSQYSIFGKYGDDGMGGKYQHIWDKNIGKCSIFKDKVRAPKYLPSALFFNLLNELSNIRLYSVDKREKSVLWRLSSKDKINIILNILQIILFKNDGKISNLDINKIVKNESIKSIILNEIDLDLIKDMWFEKEPNVYGIGLSGLNIEENKKENRFKFQDLKIFSVFIDLLKKSNINIEFNNEKDIIHNLKLLDELYFFLITQKYSRDKYGSIKKFILNNKSFNIDNLDEKLNIFLSISDDEFDNHNSKTHSLSKEAIYFIFPKLLHNNEGWNLEAIKNYDIDVREEISKHSFGIKKQDKKYLDDAFLDDAILPPSVKVTIKQSILIFNKIIKKFSNKFQIDNVVIELAREMTQEKEMDAQKSLNRLKKSRKKIIEERLNANNIDSKMFRDKTGEISPNYIYKIYLWISQNFKDPYTGENISANDILKNNVEIDHIIPYSLCFDDSSSNKVLVFKHSNQSKGNFLPFDMISTFSENSVWNWKEYTQYVEKTFKTNLESILDKKERVKKADNLLTSSYDGYDKLGFLARNLNDTRYATILFRDQLINYSENHLIDSKKMFKVIAMNGGVTSFIRKNMSFDSGLKVKDRSIFSHHAYDAAIIALFSNKTKILYNLINPSLDGIISKRSEGYWVLEDRLTGEIRKLNYNDWQSIKNNVEVKKIAREIESHLSNLDNVVMFSRKSKRKTNKELYNETLYGIATRIDENGIKNYYKKEKFNILEDENIYLRLLNERENFIINRSNPEVIDAIIEIFETIDKNKIPARDVAKNIKYTDNKIKYNLYLKDYMRKLVDEFPDKFRKDFIEQMIAKKIFILFNPIKNTTRKIKSLRSINNNKIEDIRKKQVLEKFNTAKNEPRSFYESLNSLGAIIFKNNLNIYKKMSISSQIATFGDKNWKIDDINTYNKEKLNKYKEIYGIDETYDFYSFIFPGTILLDEKNKEFLYISSIQTLKDKIELKFLDRIEFEKKNVNSNLKPKIKREIISTKKLMSDYKIIKISPLGINKKIFE

SEQ ID NO: 548 - protein, 1269 aa, Mycoplasma gallisepticum
MNNSIKSKPEVTIGLDLGVGSVGWAIVDNETNIIHHLGSRLFSQAKTAEDRRSFRGARRLIRRRKYKLKRFINLIWKYNSYFGFKNKEDILNNYQEQQKLHNTVLNLKLEALNAKIDPKALSWILHDYLKNRGHFYEDNRDFNVYPTEELANYFGEYGYYKGIIDSKEDNDDKLEEGLTKYKFSNQHWLEEIKKVLSNQTGLPEKFKEEYESLFSYVRNYSEGPGSINSVSPYGIYHLDEKEGKVVQKYNNIWDKTIGKCSIFPDEYRAPKNSPIAMIFNEINELSTIRSYSIYLTGWFINQEFKKAYLNKLLDLLIKTNSEKPIDARQFKKLREETIAESIGKETLKDVEREEKLEKEDHKWKLKGLKLNTNGKIQYNDLSSLAKFVHKLKQHLKLDFLLEDQYTTLDKINFLQSLFVYLGKHLRYSNRVDSANLKEFSDSNKLFERVLQEQKDDLFKLFEQTDKDDEKILAQTHSLSTKAMLLAITRMTNLDNDEDNQKNNDKGWNFEAIKNFDQKFIDITKKNNNLSLKQDKRYLDDRFINDAILSPGVKRILREATKVFNAILKQFSEEYDVTKVVIELARELSEEKELENTKNYEKLIKKNSDKISERLEALDIAEDKIEDILKSPTKSYKVLLWLQQDHIDPYSQKEIAFEDILTKTEKTEIDHIIPYSISFDDSSSNKLLVLAESNQAKSNQTPYEFITSGNAGIKWEDYEAYCRKFKDGDTSLLDSTQRSKKFAKMMKTDTSSKYDIGFLARNLNDTRYATIVFRDALKDYANNHLVEDKPMFKVVCINGGVTSFLRKNFDKSWYAKKDRDKNIHHAVDASIISIFSNETKTLFNQLTQFADYKLFKNTDGSWKKIDPKTGVVTEVTDENWKQIRVRNQVSEIAKVINKCIQDSNIERKARYSRKIENKTNISLFNDTVYSAKKVGYEDQIKRKNLKTLDIHESAEENKNSKVKKQFVYRKLVNVSLLNNDKLADLFAEKEDILMYRANPWVINLAEQIFNEYTENKKIKSQNVFEKYMLDLTKEFPEKFSEAFVKSMLRNKTAIIYNVEKKVVHRIKRLKILSSELKENKLSNVIIRSKNESGTKLSYQDTINSIALMIMRSIDPTAKKQYIRVPLNTLNLHLGDQDFDLHNIDAYLKKPKFVKYLKANEIGDEYKPWRVLTSGTLLIHKKDKKLMYISSFQNLKDVIEIKNLIETEYKENDDSDPKKKKKANRFLMTLSTILNDYILLDAKDNFDILGLSKNRIDEILNSKLGLDKITK

SEQ ID NO: 549 - protein, 1224 aa, Mycoplasma gallisepticum
MNNSIKSKPEVTIGLDLGVGSVGWAIVDNETNIIHHLGSRLFSQAKTAEDRRSFRGARRLIRRRKYKLKRFINLIWKYNSYFGFKNKEDILNNYQEQQKLHNTVLNLKLEALNAKIDPKALSWILHDYLKNRGHFYEDNRDFNVYPTEELANYFGEYGYYKGIIDSKEDNDDKLEEGLTKYKFSNQHWLEEIKKVLSNQTGLPEKFKEEYESLFSYVRNYSEGPGSINSVSPYGIYHLDEKEGKVVQKYNNIWDKTIGKCSIFPDEYRAPKNSPIAMIFNEINELSTIRSYSIYLTGWFINQEFKKAYLNKLLDLLIKTNSEKPIDARQFKKLREETIAESIGKETLKDVEREEKLEKEDHKWKLKGLKLNTNGKIQYNDLSSLAKFVHKLKQHLKLDFLLEDQYTTLDKINFLQSLFVYLGKHLRYSNRVDSANLKEFSDSNKLFERVLQEQKDDLFKLFEQTDKDDEKILAQTHSLSTKAMLLAITRMTNLDNDEDNQKNNDKGWNFEAIKNFDQKFIDITKKNNNLSLKQDKRYLDDRFINDAILSPGVKRILREATKVFNAILKQFSEEYDVTKVVIELARELSEEKELENTKNYEKLIKKNSDKISERLEALDIAEDKIEDILKSPTKSYKVLLWLQQDHIDPYSQKEIAFEDILTKTEKTEIDHIIPYSISFDDSSSNKLLVLAESNQAKSNQTPYEFITSGNAGIKWEDYEAYCRKFKDGDTSLLDSTQRSKKFAKMMKTDTSSKYDIGFLARNLNDTRYATIVFRDALKDYANNHLVEDKPMFKVVCINGGVTSFLRKNFDKSWYAKKDRDKNIHHAVDASIISIFSNETKTLFNQLTQFADYKLFKNTDGSWKKIDPKTGVVTEVTDENWKQIRVRNQVSEIAKVINKCIQDSNIERKARYSRKIENKTNISLFNDTVYSAKKVGYEDQIKRKNLKTLDIHESAEENKNSKVKKQFVYRKLVNVSLLNNDKLADLFAEKEDILMYRANPWVINLAEQIFNEYTENKKIKSQNVFEKYMLDLTKEFPEKFSEAFVKSMLRNKTAIIYNVEKKVVHRIKRLKILSSELKENKLSNVIIRSKNESGTKLSYQDTINSIALMIMRSIDPTAKKQYIRVPLNTLNLHLGDQDFDLHNIDAYLKKPKFVKYLKANEIGDEYKPWRVLTSGTLLIHKKDKKLMYISSFQNLKDVIEIKNLIETEYKENDDSDPKKRRKQIGS

SEQ ID NO: 550 - protein, 1269 aa, Mycoplasma gallisepticum; identical to SEQ ID NO: 138

SEQ ID NO: 551 - protein, 226 aa, Mycoplasma iowae
MSNKKKITIGLDIGVSSVGWSILREDNVLIDYGSRLFPDAANAKDGKLENEARRSHRSMRRRIRRIKTRKNDLIKLLIKYNIISDQDELAKILEQGIVNETGNVPIVEIKYKGLKEKLSKEELLICLYHYIHKRGYFYITEEDLKENGENINRLPTEIQYDFYMKNGYYIGNEDNQKFSNLIWVKEIEKFLSKQSLDSNFVDEYISLFRRVRDYSDGPGSEKSPTP

SEQ ID NO: 552 - protein, 1304 aa, Mycoplasma synoviae
MLNNVQNLWKYLLLLIFDKKIIFLFKIKVILIRRYMENNNKEKIVIGFDLGVASVGWSIVNAETKEVIDLGVRLFSEPEKADYRRAKRTTRRLLRRKKFKREKFHKLILKNAEIFGLQSRNEILNVYKDQSSKYRNILKLKINALKEEIKPSELVWILRDYLQNRGYFYKNEKLTDEFVSNSFPSKKLHEHYEKYGFFRGSVKLDNKLDNKKDKAKEKDEEEESDAKKESEELIFSNKQWINEIVKVFENQSYLTESFKEEYLKLFNYVRPFNKGPGSKNSRTAYGVFSTDIDPETNKFKDYSNIWDKTIGKCSLFEEEIRAPKNLPSALIFNLQNEICTIKNEFTEFKNWWLNAEQKSEILKFVFTELFNWKDKKYSDKKFNKNLQDKIKKYLLNFALENFNLNEEILKNRDLENDTVLGLKGVKYYEKSNATADAALEFSSLKPLYVFIKFLKEKKLDLNYLLGLENTEILYFLDSIYLAISYSSDLKERNEWFKKLLKELYPKIKNNNLEIIENVEDIFEITDQEKFESFSKTHSLSREAFNHIIPLLLSNNEGKNYESLKHSNEELKKRTEKAELKAQQNQKYLKDNFLKEALVPLSVKTSVLQAIKIFNQIIKNFGKKYEISQVVIEMARELTKPNLEKLLNNATNSNIKILKEKLDQTEKFDDFTKKKFIDKIENSVVFRNKLFLWFEQDRKDPYTQLDIKINEIEDETEIDHVIPYSKSADDSWFNKLLVKKSTNQLKKNKTVWEYYQNESDPEAKWNKFVAWAKRIYLVQKSDKESKDNSEKNSIFKNKKPNLKFKNITKKLFDPYKDLGFLARNLNDTRYATKVFRDQLNNYSKHHSKDDENKLFKVVCMNGSITSFLRKSMWRKNEEQVYRFNFWKKDRDQFFHHAVDASIIAIFSLLTKTLYNKLRVYESYDVQRREDGVYLINKETGEVKKADKDYWKDQHNFLKIRENAIEIKNVLNNVDFQNQVRYSRKANTKLNTQLFNETLYGVKEFENNFYKLEKVNLFSRKDLRKFILEDLNEESEKNKKNENGSRKRILTEKYIVDEILQILENEEFKDSKSDINALNKYMDSLPSKFSEFFSQDFINKCKKENSLILTFDAIKHNDPKKVIKIKNLKFFREDATLKNKQAVHKDSKNQIKSFYESYKCVGFIWLKNKNDLEESIFVPINSRVIHFGDKDKDIFDFDSYNKEKLLNEINLKRPENKKFNSINEIEFVKFVKPGALLLNFENQQIYYISTLESSSLRAKIKLLNKMDKGKAVSMKKITNPDEYKIIEHVNPLGINLNWTKKLENNN

SEQ ID NO: 553 - protein, 1401 aa, Myroides injenensis
MKRILGLDLGTTSIGWAYVHEAENVNETSSIQKVGVRVNPLTTEEQTNFEKGKPITTNASRTLARSARRNLQRYKLRRDNLIQILKENNWINNTTSLTETGNHSTFETYELRNKAASEKLTLDQLSRVLLMLNKKRGYKSSRKVNSKEEGQLIDGMEVAKKLYHEQLTPGQLSLQLMNQGVKKLPDYYRSDLNQELESIWNFQQQFYPNILTDKFKEEINGKGLTSTSSAFWNIYNFNTAENKGSRDEKKKQALQWRSEALSKQLSKEIVAYIIADLNGQIYNSSGYLGAISDRSKELYFNNLTVGQYLFKQLKSNPHTSLKNQVFYRQDYLNEFEKIWETQSKFYPKELTAALKREIRDVIIFYQRKLKSQKGLISFCEFEQKQKTINGKTKTIGHRVIPKSSPLFQEFKIWQQLHNVVLRNKKTNEIVSLADEQKVHLFEELNLKGKLKSNQVLKLIENKPKDWELNYTELEGNNTNKALYNAYLDILDIEGYDVRNELKVKLNKDDIELSDLDVNASEIKEMIFSVFKHLGINTEILEFDATLEDKVFEKQASYQLWHLLYSYEEDNSPTGLDRLYNLLHKKFGFKLNHAKLIGNVLFQDDYGSLSSKAIKNIFPYITENNYYTACELAGYKHSKHSLTKEENETRELKNRLTILPKNSLRNPVVEKIINQMINVVNTLIDEENNILIAQGKEPNFQFDEIRIELARELKKNAKEREELTKSINKSKTDHEKIIKILQKEDGIKNPTRNDIVRFKLYSELKNNGYKDLYTNEYIERKDIFTKEYDIEHIIPQSKLFDDSFSNKTLVRRNVNLKKGNQTAYDFILCEYGQEKANEFETRITNLYNLGKDEGISKSKFKKLLMQESEIGNGFIERDLRETQYIAKKAKSLLLEITRNVISTSGSITDRLREDWGLINVMKELNLQKYRDAGLTEFVKMKDGNKKEVIIDWTKRNDHRHHAMDALTIAFTKHNHIQYLNHLNARKNVNNELHNNIIAIEKLETTLVSDERGNKKRIFKEPIANFRTIAKSHLEAILVSHKAKNKVVTKNINKISGKKISQQTLTPRGQLHKETIYGKIRQYVSKQEKVGPKFTIEVIEQVSNPTYRNLLLKRLEENNNDPKKAFGGKNSLNKNPIYINLEKNIKVPEVLKLVWLEDNYTIRKEISPDLKIDKVIDQGVKQILQNRLAQYKGDSKLAFSNLDANPIWLNEDKGIAIKRVTISGIATAQPLHRKKDHLGQPILDHNGQEIPVDFISTGNNHHVAIYEDENGKLQESVVSHFEAVERVNQKLPIIDKTFNQHLGWKFLFTMKQNELFLFPSDDFNPNEIDLFDKQNYTVISKHLFRIQKLSTKDYSFRHHLETNVEEIKDLKTITWRREGLNGIQNIIKVRTNHLGEIIHIGEY

SEQ ID NO: 554 - protein, 1466 aa, Myroides odoratus
MKNILGLDLGTNSIGWALVKEDFENKQGEILGLGSRIIPMSQDILGEFGRGNSISQTADRTGYRGVRRLRERHLLRRERLHRVLNILGFLPNHYAKEIDFTKRLGKFINHAEPKLSFDKEFIFKDSFNEMLKDFQQNQPGFIINKHGEEALVPYDWTIYYLRKKALTQKIDKEELAWILLNFNQKRGYYQLRGEEEEENTNKLVEFYSLKIIDVIADNEVNKKGEVWYSLHLENGWIYRRSSKISLVDWKDKVRDFIVTTDVNDDGSEKLDKDGVVKRSFRAPSADDWTLLKKKTEQDIDNSNKTVGAYIYENLLLNPKQKIKGKLVRTIERKFYKDELKQILEKQKEFHQELQNEQLLQDCVRELYKYNEQHQQMLESKDFVHLFLNDIIFYQRPLRSQKSLISNCTLEKRVSRDGVVFPIKVISKSNPYYQEFRLLQWLQNLAIYRKDDDVNVTQEFLNSIESWENLLQFLNAKKEIKQEQLIKFLLEQKGLKGNSLKTAILTYRWNYVTDKVYPMNETRSLIQDKLKKVENVATDFLSFDNEMALWHIIYSVNDKIEYEKALAKFASKHNLDEISFVESFKKFPPFKSDYGSFSEKAIKKLLPLMRFGSVWNKNNIVPSVLDRIDKILTGEYDEKIKIRVREKAEQFQLNQIEDFQNLPLWLAQYVVYDRHSEAEIAGKWNSVKDLENYLKEFKQHSLRNPIVEQIITETLRVVKDIWQQYGNGVQNFFDEIHIELGREMKNTADERKRITNSVTENENTNLRIKALLVELKEDTNIENVRPHSPMQQEILKIYEEGVLNAVENIDEDILKISKTAQPSKSELIRYKLWLEQKYQSPYTGEMIPLSRLFTSDYEIEHVIPQSRYFDDSLSNKVICEAAVNKRKDNQLGLEFIKNHHSEKIELGNGRTAQVLEVEAYESFVKKNYDKNRGKRNKLLLEDVPEKMIERQLNDTRYISKFVTHLLSNIVRKDEVNSKDDGINSKNIIPGNGKITSQLKQDWGLNDVWNELILPRFERMNNLTNSTDFTSTNTNGKIIPTVPLEYSKGFSKKRIDHRHHALDALVIALATRDHVNLLNNESALPKKDRTKEEQKSFRFDLQVNLRNKEKYFNVKEGREKEKFTTFKKPWNTLTQDTRDALENMVVSFKQNLRVINKATNYYESYTDENGNLRLDKYGNPKKELISQKGTNWAIRKSLHKETVSGQIHLDRVKVTKGKIVTATRKSLDSSFNEKSIESITDTGIQKILRNYLKAKDNKPDVAFSPEGIEELNKSISVYNEGKNHQPIIKVRIFEQGSKFPVGETGNKIAKFVEAAKGTNLFFGIYQDKTGKRSYDTIPLNLVIERLKQGLSPVPETNEKGHQLLFHLSPNDLVYVPTIDDNEQLDSNRVYKFTDSSDTTCNFIPSNISAIIFNINSKEQEKRGINYPIQNELGVGSPQSKNQKSFDGFMIKEVCIKLKVDRLGNISKT

SEQ ID NO: 555 - protein, 241 aa, Neisseria lactamica
MAAFKPNPMNYILGLDIGIASVGWAMVEIDKEENPIRLIDLGVRVFERAEMPKTGDSLAMARRLARSVRRLTRRRAHRLLRARRLLKREGVLQDADFDENGLVKSLPNTPWQLRAAALDRKLTCLEWSAVLLHLIKHRGYLSQRKNEGETADKELGALLKGVADNAHALQTGDFRTPAELALNKFEKESGHIRNQRGDYSHTFSRKDLQAELNLLFEKQKEFGNPHVSDGLKEGIETLLMA

SEQ ID NO: 556 - protein, 666 aa, Neisseria lactamica
MAAFKPNPMNYILGLDIGIASVGWAMVEVDEEENPIRLIDLGVRVFERAEVPKTGDSLAMARRLARSVRRLTRRRAHRLLRARRLLKREGVLQDADFDENGLVKSLPNTPWQLRAAALDRKLTCLEWSAVLLHLVKHRGYLSQRKNEGETADKELGALLKGVADNAHALQTGDFRTPAELALNKFEKESGHIRNQRGDYSHTFSRKDLQAELNLLFEKQKEFGNPHVSDGLKEDIETLLMAQRPALSGDAVQKMLGHCTFEPAEPKAAKNTYTAERFIWLTKLNNLRILEQGSERPLTDTERATLMDEPYRKSKLTYAQARKLLGLEDTAFFKGLRYGKDNAEASTLMEMKAYHAISRALEKEGLKDKKSPLNLSTELQDEIGTAFSLFKTDKDITGRLKDRVQPEILEALLKHISFDKFVQISLKALRRIVPLMEQGKRYDEACAEIYGDHYCKKNAEEKIYLPPIPADEIRNPVVLRALSQARKVINCVVRRYGSPARIHIETAREVGKSFKDRKEIEKRQEENRKDREKAAAKFREYFPNFVGEPKSKDILKLRLYEQQHGKCLYSGKEINLVRLNEKGYVEIDHALPFSRTWDDSFNNKVLVLGSENQNKGNQTPYEYFNGKDNSREWQEFKARVETSRFPRSKNNGFCCKNSMKKDLKNAT

SEQ ID NO: 557 - protein, 828 aa, Neisseria lactamica
MLGHCTFEPAEPKAAKNTYTAERFIWLTKLNNLRILEQGSERPLTDTERATLMDEPYRKSKLTYAQARKLLGLEDTAFFKGLRYGKDNAEASTLMEMKAYHAISRALEKEGLKDKKSPLNLSTELQDEIGTAFSLFKTDKDITGRLKDRVQPEILEALLKHISFDKFVQISLKALRRIVPLMEQGKRYDEACAEIYGDHYGKKNTEEKIYLPPIPADEIRNPVVLRALSQARKVINAVVRRYDSPARIHIETAREVGKSFKDRKEIEKRQEENRKDREKAAAKFREYFPNFVGEPKSKDILKLRLYEQQHGKCLYSGKEINLVRLNEKGYVEIDHALPFSRTWDDSFNNKVLVLGSENQNKGNQTPYEYFNGKDNSREWQEFKARVETSRFPRSKKQRILLQKFDEEGFKERNLNDTRYVNRFLCQFVADHILLTGKGKRRVFASNGQITNLLRGFWGLRKVRAENDRHHALDAVVVACSTVAMQQKITRFVRYKEMNAFDGKTIDKETGEVLHQKAHFPQPWEFFAQEVMIRVFGKPDGKPEFEEADTSEKLRTLLAEKLSSRPEAVHEYVTPLFVSRAPNRKMSGQGHMETVKSAKRLDEGISVLRVPLTQLKLKDLEKMVNREREPKLYDALKAQLETHKDDPAKAFAEPFYKYDKAGSRTQQVKAVRIEQVQKTGVWVRNHNGIADNATMVRVDVFEKGGKYYLVPIYSWQVAKGILPDRAVVAFKDEEDWTVMDDSFEFRFVLYANDLIKAELKKETFFGYFSGLDRSTGNISLRSHDLDKTKGKDGVYRIGIKTALSFQKHQIDELGKEIRPCRLKKRPPVR

SEQ ID NO: 558 - protein, 408 aa, Neisseria lactamica
MNDTRYVNRFLCQFVADHILLTGKGKRRVFASNGQITNLLRGFWGLRKVRTENDRHHALDAVVVACSTVAMQQKITRFVRYKEMNAFDGKTIDKETGEVLHQKAHFPQPWEFFAQEVMIRVFGKPDGKPEFEEADTPEKLRTLLAEKLSSRPEAVHEYVTPLFVSRAPNRKMSGQGHMETVKSAKRLDEGISVLRVPLTQLKLKGLEKMVNREREPKLYDALKAQLETHKDDPAKAFAEPFYKYDKAGSRTQQVKAVRIEQVQKTGVWVRNHNGIADNATMVRVDVFEKGGKYYLVPIYSWQVAKGILPDRAVVAFKDEEDWTVMDDSFEFRFVLYANDLIKLTAKKNEFLGYFVSLNRATGAIDIRTHDTDSTKGKNGIFQSVGVKTALSFQKTKSTNSAKKSDHAV

SEQ ID NO: 559 - protein, 1082 aa, Neisseria meningitidis
MAAFKPNPINYILGLDIGIASVGWAMVEIDEDENPICLIDLGVRVFERAEVPKTGDSLAAARRLARSVRRLTRRRAHRLLRARRLLKREGVLQAADFDENGLIKSLPNTPWQLRAAALDRKLTPLEWSAVLLHLIKHRGYLSQRKNEGETADKELGALLKGVADNAHALQTGDFRTPAELALNKFEKESGHIRNQRGDYSHTFSRKDLQAELILLFEKQKEFGNPHVSGGLKEGIETLLMTQRPALSGDAVQKMLGHCTFEPAEPKAAKNTYTAERFIWLTKLNNLRILEQGSERPLTDTERATLMDEPYRKSKLTYAQARKLLGLEDTAFFKGLRYGKDNAEASTLMEMKAYHAISRALEKEGLKDKKSPLNLSPELQDEIGTAFSLFKTDEDITGRLKDRVQPEILEALLKHISFDKFVQISLKALRRIVPLMEQGKRYDEACAEIYGDHYGKKNTEEKIYLPPIPADEIRNPVVLRALSQARKVINGVVRRYGSPARIHIETAREVGKSFKDRKEIEKRQEENRKDREKAAAKFREYFPNFVGEPKSKDILKLRLYEQQHGKCLYSGKEINLGRLNEKGYVEIDHALPFSRTWDDSFNNKVLVLGSENQNKGNQTPYEYFNGKDNSREWQEFKARVETSRFPRSKKQRILLQKFDEDGFKERNLNDTRYVNRFLCQFVADRMRLTGKGKKRVFASNGQITNLLRGFWGLRKVRAENDRHHALDAVVVACSTVAMQQKITRFVRYKEMNAFDGKTIDKETGEVLHQKTHFPQPWEFFAQEVMIRVFGKPDGKPEFEEADTPEKLRTLLAEKLSSRPEAVHEYVTPLFVSRAPNRKMSGQGHMETVKSAKRLDEGVSVLRVPLTQLKLKDLEKMVNREREPKLYEALKARLEAHKDDPAKAFAEPFYKYDKAGNRTQQVKAVRVEQVQKTGVWVRNHNGIADNATMVRVDVFEKGDKYYLVPIYSWQVAKGILPDRAVVQGKDEEDWQLIDDSFNFKFSLHPNDLVEVITKKARMFGYFASCHRGTGNINIRIHDLDHKIGKNGILEGIGVKTALSFQKYQIDELGKEIRPCRLKKRPPVR

SEQ ID NO: 560 - protein, 976 aa, Neisseria meningitidis
MAAFKPNPINYILGLDIGIASVGWAMVEIDEDENPICLIDLGVRVFERAEVPKTGDSLAAARRLARSVRRLTRRRAHRLLRARRLLKREGVLQAADFDENGLIKSLPNTPWQLRAAALDRKLTPLEWSAVLLHLIKHRGYLSQRKNEGETADKELGALLKGVADNAHALQTGDFRTPAELALNKFEKESGHIRNQRGDYSHTFSRKDLQAELILLFEKQKEFGNPHVSGGLKEGIETLLMTQRPALSGDAVQKMLGHCTFEPAEPKAAKNTYTAERFIWLTKLNNLRILEQGSERPLTDTERATLMDEPYRKSKLTYAQARKLLGLEDTAFFKGLRYGKDNAEASTLMEMKAYHAISRALEKEGLKDKKSPLNLSPELQDEIGTAFSLFKTDEDITGRLKDRIQPEILEALLKHISFDKFVQISLKALRRIVPLMEQGKRYDEACAEIYGDHYGKKNTEEKIYLPPIPADEIRNPVVLRALSQARKVINGVVRRYGSPARIHIETAREVGKSFKDRKEIEKRQEENRKDREKAAAKFREYFPNFVGEPKSKDILKLRLYEQQHGKCLYSGKEINLGRLNEKGYVEIDHALPFSRTWDDSFNNKVLVLGSENQNKGNQTPYEYFNGKDNSREWQEFKARVETSRFPRSKKQRILLQKFDEDGFKERNLNDTRYVNRFLCQFVADRMRLTGKGKKRVFASNGQITNLLRGFWGLRKVRAENDRHHALDAVVVACSTVAMQQKITRFVRYKEMNAFDGKTIDKETGEVLHQKTHFPQPWEFFAQEVMIRVFGKPDGKPEFEEADTPEKLRTLLAEKLSSRPEAVHEYVTPLFVSRAPNRKMSGQGHMETVKSAKRLDEGVSVLRVPLTQLKLKDLEKMVNREREPKLYEALKARLEAHKDDPAKAFAEPFYKYDKAGNRTQQVKAVRVEQVQKTGVWVRNHNGIADNATMVRVDVFEKGDKYYLVPIYSWQVAKGIFAG

SEQ ID NO: 561 - protein, 1081 aa, Neisseria meningitidis
MAAFKPNPINYILGLDIGIASVGWAMVEIDEDENPICLIDLGVRVFERAEVPKTGDSLAAARRLARSVRRLTRRRAHRLLRARRLLKREGVLQAADFDENGLIKSLPNTPWQLRSAALDRKLTPLEWSAVLLHLIKHRGYLSQRKNEGETADKELGALLKGVADNAHALQTGDFRTPAELALNKFEKESGHIRNRRGDYSHTFSRKDLQAELDLLFEKQKEFGNPHISDDLKEGIETLLMTQRPALSGDAVQKMLGHCTFEPTEPKAAKNTYTAERFVWLTKLNNLRILEQGSERPLTDTERATLMDEPYRKSKLTYAQARKLLELDDTAFFKGLRYGKDNAEASTLMEMKAYHAISRALEKEGLKDKKSPLNLSPELQDEIGTAFSLFKTDEDITGRLKDRVQPEILEVLLKHISFDKFVQISLKALRRIVPLMEQGKRYDEACAEIYGDHDGKKNTEEKIYLPPIPADEIRNPVVLRALSQARKVINAVVRRYGSPARIHIETAREVGKSFKDRKEIEKRQEENRKDREKAAAKFREYFPNFVGEPKSKDILKLRLYEQQHGKCLYSGKEINLGRLNEKGYVEIDHALPFSRTWDDSFNNKVLVLGSENQNKGNQTPYEYFNGKDNSREWQEFKARVETSRFPRSKKQRILLQKFDEEGFKERNLNDTRYVNRFLCQFVADHMLLTGKGKRRVFASNGQITNLLRGFWGLRKVRAENNRHHALDAVVVACSTVAMQQKITRFVRYKEMNAFDGKTIDKETGEVLHQKTHFPQPWEFFAQEVMIRVFGKPDGKPEFEEADTPEKLRTLLAEKLSSRPEAVHEYVTPLFVSRAPNRKMSGQGHMETVKSAKRLDEGVSVLRVPLTQLKLKDLEKMVNREREPKLYEALKARLEAHKDDPAKAFAEPFYKYDKAGNRTQQVKAVRVEQVQKTGVWVRNHNGIADNATMVRVDVFEKAGKYYLVPIYSWQVAKGILPDRAVVAYADEEGWTVIDESFRFKFVLYSNDLIKVQLKKDSFLGYFSGLDRATGAISLREHDLEKSKGKDGMHRIGVKTALSFQKYQIDEMGKEIRLCRLKKRPPVR

SEQ ID NO: 562 - protein, 1081 aa, Neisseria meningitidis
MAAFKPNPINYILGLDIGIASVGWAMVEIDEDENPICLIDLGVRVFERAEVPKTGDSLAAARRLARSVRRLTRRRAHRLLRARRLLKREGVLQAADFDENGLIKSLPNTPWQLRSAALDRKLTPLEWSAVLLHLIKHRGYLSQRKNEGETADKELGALLKGVANNAHALQTGDFRTPAELALNKFEKESGHIRNQRGDYSHTFSRKDLQAELILLFEKQKEFGNPHVSGGLKEGIETLLMTQRPALSGDAVQKMLGHCTFEPAEPKAAKNTYTAERFIWLTKLNNLRILEQGSERPLTDTERATLMDEPYRKSKLTYAQARKLLGLEDTAFFKGLRYGKDNAEASTLMEMKAYHAISRALEKEGLKDKKSPLNLSPELQDEIGTAFSLFKTDEDITGRLKDRIQPEILEALLKHISFDKFVQISLKALRRIVPLMEQGKRYDEACAEIYGDHYGKKNTEEKIYLPPIPADEIRNPVVLRALSQARKVINGVVRRYGSPARIHIETAREVGKSFKDRKEIEKRQEENRKDREKAAAKFREYFPNFVGEPKSKDILKLRLYEQQHGKCLYSGKEINLGRLNEKGYVEIDHALPFSRTWDDSFNNKVLVLGSENQNKGNQTPYEYFNGKDNSREWQEFKARVETSRFPRSKKQRILLQKFDEDGFKERNLNDTRYVNRFLCQFVADRMRLTGKGKKRVFASNGQITNLLRGFWGLRKVRAENDRHHALDAVVVACSTVAMQQKITRFVRYKEMNAFDGKTIDKETGEVLHQKTHFPQPWEFFAQEVMIRVFGKPDGKPEFEEADTPEKLRTLLAEKLSSRPEAVHEYVTPLFVSRAPNRKMSGQGHMETVKSAKRLDEGVSVLRVPLTQLKLKDLEKMVNREREPKLYEALKARLEAHKDDPAKAFAEPFYKYDKAGNRTQQVKAVRVEQVQKTGVWVRNHNGIADNATMVRVDVFEKAGKYYLVPIYSWQVAKGILPDRAVVAYADEEGWTVIDESFRFKFVLYSNDLIKVQLKKDSFLGYFSGLDRATGAISLREHDLEKSKGKDGMHRIGVKTALSFQKYQIDEMGKEIRLCRLKKRPPVR

SEQ ID NO: 563 - protein, 1082 aa, Neisseria meningitidis
MAAFKPNPINYILGLDIGIASVGWAMVEIDEDENPICLIDLGVRVFERAEVPKTGDSLAMARRLARSVRRLTRRRAHRLLRARRLLKREGVLQAADFDENGLIKSLPNTPWQLRAAALDRKLTPLEWSAVLLHLIKHRGYLSQRKNEGETADKELGALLKGVADNAHALQTGDFRTPAELALNKFEKESGHIRNQRGDYSHTFSRKDLQAELILLFEKQKEFGNPHVSGGLKEGIETLLMTQRPALSGDAVQKMLGHCTFEPAEPKAAKNTYTAERFIWLTKLNNLRILEQGSERPLTDTERATLMDEPYRKSKLTYAQARKLLGLEDTAFFKGLRYGKDNAEASTLMEMKAYHAISRALEKEGLKDKKSPLNLSPELQDEIGTAFSLFKTDEDITGRLKDRIQPEILEALLKHISFDKFVQISLKALRRIVPLMEQGKRYDEACAEIYGDHYGKKNTEEKIYLPPIPADEIRNPVVLRALSQARKVINGVVRRYGSPARIHIETAREVGKSFKDRKEIEKRQEENRKDREKAAAKFREYFPNFVGEPKSKDILKLRLYEQQHGKCLYSGKEINLGRLNEKGYVEIDHALPFSRTWDDSFNNKVLVLGSENQNKGNQTPYEYFNGKDNSREWQEFKARVETSRFPRSKKQRILLQKFDEDGFKERNLNDTRYVNRFLCQFVADRMRLTGKGKKRVFASNGQITNLLRGFWGLRKVRAENDRHHALDAVVVACSTVAMQQKITRFVRYKEMNAFDGKTIDKETGEVLHQKTHFPQPWEFFAQEVMIRVFGKPDGKPEFEEADTPEKLRTLLAEKLSSRPEAVHEYVTPLFVSRAPNRKMSGQGHMETVKSAKRLDEGVSVLRVPLTQLKLKDLEKMVNREREPKLYEALKARLEAHKDDPAKAFAEPFYKYDKAGNRTQQVKAVRVEQVQKTGVWVRNHNGIADNATMVRVDVFEKGDKYYLVPIYSWQVAKGILPDRAVVQGKDEEDWQLIDDSFNFKFSLHPNDLVEVITKKARMFGYFASCHRGTGNINIRIHDLDHKIGKNGILEGIGVKTALSFQKYQIDELGEEIRPCRLKKRPPVR

SEQ ID NO: 564 - protein, 1082 aa, Neisseria meningitidis
MAAFKPNPINYILGLDIGIASVGWAMVEIDEDENPICLIDLGVRVFERAEVPKTGDSLAMARRLARSVRRLTRRRAHRLLRARRLLKREGVLQAADFDENGLIKSLPNTPWQLRAAALDRKLTPLEWSAVLLHLIKHRGYLSQRKNEGETADKELGALLKGVADNAHALQTGDFRTPAELALNKFEKESGHIRNQRGDYSHTFSRKDLQAELILLFEKQKEFGNPHVSGGLKEGIETLLMTQRPALSSDAVQKMLGHCTFEPAEPKAAKNTYTAERFIWLTKLNNLRILEQGSERPLTDTERATLMDEPYRKSKLTYAQARKLLGLEDTAFFKGLRYGKDNAEASTLMEMKAYHAISRALEKEGLKDKKSPLNLSPELQDEIGTAFSLFKTDEDITGRLKDRIQPEILEALLKHISFDKFVQISLKALRRIVPLMEQGKRYDEACAEIYGDHYGKKNTEEKIYLPPIPADEIRNPVVLRALSQARKVINGVVRRYGSPARIHIETAREVGKSFKDRKEIEKRQEENRKDREKAAAKFREYFPNFVGEPKSKDILKLRLYEQQHGKCLYSGKEINLGRLNEKGYVEIDHALPFSRTWDDSFNNKVLVLGSENQNKGNQTPYEYFNGKDNSREWQEFKARVETSRFPRSKKQRILLQKFDEDGFKERNLNDTRYVNRFLCQFVADRMRLTGKGKKRVFASNGQITNLLRGFWGLRKVRAENDRHHALDAVVVACSTVAMQQKITRFVRYKEMNAFDGKTIDKETGEVLHQKTHFPQPWEFFAQEVMIRVFGKPDGKPEFEEADTPEKLRTLLAEKLSSRPEAVHEYVTPLFVSRAPNRKMSGQGHMETVKSAKRLDEGVSVLRVPLTQLKLKDLEKMVNREREPKLYEALKARLEAHKDDPAKAFAEPFYKYDKAGNRTQQVKAVRVEQVQKTGVWVRNHNGIADNATMVRVDVFEKGDKYYLVPIYSWQVAKGILPDRAVVQGKDEEDWQLIDDSFNFKFSLHPNDLVEVITKKARMFGYFASCHRGTGNINIRIHDLDHKIGKNGILEGIGVKTALSFQKYQIDELGKEIRPCRLKKRPPVR

SEQ ID NO: 565 - protein, 1082 aa, Neisseria meningitidis
MAAFKPNPINYILGLDIGIASVGWAMVEIDEDENPICLIDLGVRVFERAEVPKTGDSLAMARRLARSVRRLTRRRAHRLLRARRLLKREGVLQAADFDENGLIKSLPNTPWQLRAAALDRKLTPLEWSAVLLHLIKHRGYLSQRKNEGETADKELGALLKGVADNAHALQTGDFRTPAELALNKFEKESGHIRNQRGDYSHTFSRKDLQAELILLFEKQKEFGNPHVSGGLKEGIETLLMTQRPALSSDAVQKMLGHCTFEPAEPKAAKNTYTAERFIWLTKLNNLRILEQGSERPLTDTERATLMDEPYRKSKLTYAQARKLLGLEDTAFFKGLRYGKDNAEASTLMEMKAYHAISRALEKEGLKDKKSPLNLSPELQDEIGTAFSLFKTDEDITGRLKDRIQPEILEALLKHISFDKFVQISLKALRRIVPLMEQGKRYDEACAEIYGDHYGKKNTEEKIYLPPIPADEIRNPVVLRALSQARKVINGVVRRYGSPARIHIETAREVGKSFKDRKEIEKRQEENRKDREKAAAKFREYFPNFVGEPKSKDILKLRLYEQQHGKCLYSGKEINLGRLNEKGYVEIDHALPFSRTWDDSFNNKVLVLGSENQNKGNQTPYEYFNGKDNSREWQEFKARVETSRFPRSKKQRILLQKFDEDGFKERNLNDTRYVNRFLYQFVADRMRLTGKGKKRVFASNGQITNLLRGFWGLRKVRAENDRHHALDAVVVACSTVAMQQKITRFVRYKEMNAFDGKTIDKETGEVLHQKTHFPQPWEFFAQEVMIRVFGKPDGKPEFEEADTPEKLRTLLAEKLSSRPEAVHEYVTPLFVSRAPNRKMSGQGHMETVKSAKRLDEGVSVLRVPLTQLKLKDLEKMVNREREPKLYEALKARLEAHKDDPAKAFAEPFYKYDKAGNRTQQVKAVRVEQVQKTGVWVRNHNGIADNATMVRVDVFEKGDKYYLVPIYSWQVAKGILPDRAVVQGKDEEDWQLIDDSFNFKFSLHPNDLVEVITKKARMFGYFASCHRGTGNINIRIHDLDHKIGKNGILEGIGVKTALSFQKYQIDELGKEIRPCRLKKRPPVR

SEQ ID NO: 566 - protein, 1081 aa, Neisseria meningitidis
MAAFKPNPINYILGLDIGIASVGWAMVEIDEDENPICLIDLGVRVFERAEVPKTGDSLAMARRLARSVRRLTRRRAHRLLRARRLLKREGVLQAADFDENGLIKSLPNTPWQLRAAALDRKLTPLEWSAVLLHLIKHRGYLSQRKNEGETADKELGALLKGVADNAHALQTGDFRTPAKLALNKFEKESGHIRNQRGDYSHTFSRKDLQAELNLLFEKQKEFGNPHISDGLKEGIETLLMTQRPALSGDAVQKMLGHCTFEPTEPKAAKNTYTAERFVWLTKLNNLRILEQGSEQPLTDTQRAKLMDEPYRKSKLTYAQARKLLGLEDTAFFKGLRYGKDNAEASTLMEMKAYHAISRALEKEGLKDKKSPLNLSPELQDEIGTAFSLFKTDEDITGRLKDRVQPEILEALLKHISFDKFVQISLKALRRIVPLMEQGKRYNEACAEIYGDHYGKKNTEEKIYLPPIPADEIRNPVVLRALSQARKVINGVVRRYGSPARIHIETAREVGKSFKDRKEIEKRQEENRKDREKAAAKFQEYFPNFVGEPKSKDILKLRLYEQQHGKCLYSGKEINLGRLNEKGYVEIDHALPFSRTWDDSFNNKVLVLGSENQNKGNQTPYEYFNGKDNSREWQEFKARVETSRFPRSKKQRILLQKFDEDGFKERNLNDTRYVNRFLCQFVADRMRLTGKGKKRVFASNGQITNLLRGFWGLRKVRAENDRHHALDAVVVACSTVAMQQKITRFVRYKEMNAFDGKTIDKETGEVLHQKTHFPQPWEFFAQEVMIRVFGKPDGKPEFEEADTPEKLRTLLAEKLSSRPEAVHEYVTPLFVSRAPNRKMSGQGHMETVKSAKRLDEGVSVLRVPLTQLKLKDLEKMVNREREPKLYEALKARLEAHKDDPAKAFAEPFYKYDKAGNRTQQVKAVRVEQVQKTGVWVRNHNGIADNATMVRVDVFEKGDKYYLVPIYSWQVAKGILPDRAVVAYADEEDWTVIDESFRFKFVLYSNDLIKVQLKKDSFLGYFSGLDRATGAISLREHDLEKSKGKDGMHRIGVKTALSFQKYQIDEMGKEIRPCRLKKRPPVR

SEQ ID NO: 567 - protein, 1081 aa, Neisseria meningitidis
MAAFKPNPINYILGLDIGIASVGWAMVEIDEEENPIRLIDLGVRVFERAEVPKTGDSLAMARRLARSVRRLTRRRAHRLLRARRLLKREGVLQAADFDENGLIKSLPNTPWQLRAAALDRKLTPLEWSAVLLHLIKHRGYLSQRKNEGETADKELGALLKGVADNAHALQTGDFRTPAELALNKFEKECGHIRNQRGDYSHTFSRKDLQAELNLLFEKQKEFGNPHVSGGLKEGIETLLMTQRPALSGDAVQKMLGHCTFEPAEPKAAKNTYTAERFIWLTKLNNLRILEQGSERPLTDTERATLMDEPYRKSKLTYAQARKLLSLEDTAFFKGLRYGKDNAEASTLMEMKAYHTISRALEKEGLKDKKSPLNLSPELQDEIGTAFSLFKTDEDITGRLKDRIQPEILEALLKHISFDKFVQISLKALRRIVPLMEQGKRYDEACAEIYGDHYGKKNTEEKIYLPPIPADEIRNPVVLRALSQARKVINGVVRRYGSPARIHIETAREVGKSFKDRKEIEKRQEENRKDREKAAAKFREYFPNFVGEPKSKDILKLRLYEQQHGKCLYSGKEINLGRLNEKGYVEIDHALPFSRTWDDSFNNKVLVLGSENQNKGNQTPYEYFNGKDNSREWQEFKARVETSRFPRSKKQRILLQKFDEDGFKERNLNDTRYVNRFLCQFVADRMRLTGKGKKRVFASNGQITNLLRGFWGLRKVRAENDRHHALDAVVVACSTVAMQQKITRFVRYKEMNAFDGKTIDKETGEVLHQKTHFPQPWEFFAQEVMIRVFGKPDGKPEFEEADTPEKLRTLLAEKLSSRPEAVHEYVTPLFVSRAPNRKMSGQGHMETVKSAKRLDEGVSVLRVPLTQLKLKDLEKMVNREREPKLYEALKARLEAHKDDPAKAFAEPFYKYDKAGNRTQQVKAVRVEQVQKTGVWVRNHNGIADNATMVRVDVFEKGDKYYLVPIYSWQVAKGILPDRAVVAYADEEDWTVIDESFRFKFVLYSNDLIKVQLKKDSFLGYFSGLDRATGAISLREHDLEKSKGKDGMHRIGVKTALSFQKYQIDEMGKEIRPCRLKKRPPVR

SEQ ID NO: 568 - protein, 1082 aa, Neisseria meningitidis
MAAFKPNPINYILGLDIGIASVGWAMVEIDEEENPIRLIDLGVRVFERAEVPKTGDSLAMARRLARSVRRLTRRRAHRLLRARRLLKREGVLQAADFDENGLIKSLPNTPWQLRAAALDRKLTPLEWSAVLLHLIKHRGYLSQRKNEGETADKELGALLKGVADNAHALQTGDFRTPAELALNKFEKECGHIRNQRGDYSHTFSRKDLQAELNLLFEKQKEFGNPHVSGGLKEGIETLLMTQRPALSGDAVQKMLGHCTFEPAEPKAAKNTYTAERFIWLTKLNNLRILEQGSERPLTDTERATLMDEPYRKSKLTYAQARKLLGLEDTAFFKGLRYGKDNAEASTLMEMKAYHAISRALEKEGLKDKKSPLNLSPELQDEIGTAFSLFKTDEDITGRLKDRIQPEILEALLKHISFDKFVQISLKALRRIVPLMEQGKRYDEACAEIYGDHYGKKNTEEKIYLPPIPADEIRNPVVLRALSQARKVINGVVRRYGSPARIHIETAREVGKSFKDRKEIEKRQEENRKDREKAAAKFREYFPNFVGEPKSKDILKLRLYEQQHGKCLYSGKEINLVRLNEKGYVEIDHALPFSRTWDDSFNNKVLVLGSENQNKGNQTPYEYFNGKDNSREWQEFKARVETSRFPRSKKQRILLQKFDEEGFKERNLNDTRYVNRFLCQFVADHILLTGKGKRRVFASNGQITNLLRGFWGLRKVRAENDRHHALDAVVVACSTVAMQQKITRFVRYKEMNAFDGKTIDKETGEVLHQKTHFPQPWEFFAQEVMIRVFGKPDGKPEFEEADTPEKLRTLLAEKLSSRPEAVHEYVTPLFVSRAPNRKMSGQGHMETVKSAKRLDEGVSVLRVPLTQLKLKDLEKMVNREREPKLYEALKARLEAHKDDPAKAFAEPFYKYDKAGNRTQQVKAVRVEQVQKTGVWVRNHNGIADNATMVRVDVFEKGGKYYLVPIYSWQVAKGILPDRAVVQGKDEEDWQLIDDSFNFKFSLHPNDLVEVITKKARMFGYFASCHRGTGNINIRIHDLDHKIGKNGILEGIGVKTALSFQKYQIDELGKEIRPCRLKKRPPVR

SEQ ID NO: 569 - protein, 1081 aa, Neisseria meningitidis
MAAFKPNPINYILGLDIGIASVGWAMVEIDEEENPIRLIDLGVRVFERAEVPKTGDSLAMARRLARSVRRLTRRRAHRLLRARRLLKREGVLQAADFDENGLIKSLPNTPWQLRAAALDRKLTPLEWSAVLLHLIKHRGYLSQRKNEGETADKELGALLKGVADNAHALQTGDFRTPAELALNKFEKESGHIRNQRGDYSHTFSRKDLQAELILLFEKQKEFGNPHVSGGLKEGIETLLMTQRPALSGDAVQKMLGHCTFEPAEPKAAKNTYTAERFIWLTKLNNLRILEQGSERPLTDTERATLMDEPYRKSKLTYAQARKLLGLEDTAFFKGLRYGKDNAEASTLMEMKAYHAISRALEKEGLKDKKSPLNLSPELQDEIGTAFSLFKTDEDITGRLKDRVQPEILEALLKHISFDKFVQISLKALRRIVPLMEQGKRYDEACAEIYGDHYGKKNTEEEIYLPPITADEIRNPVVLRALSQARKVINAVVRRYGSPARIHIETAREVGKSFKDRKEIEKRQEENRKDREKAAAKFREYFPNFVGEPKSKDILKLRLYEQQHGKCLYSGKEINLVRLNEKGYVEIDHALPFSRTWDDSFNNKVLVLGSENQNKGNQTPYEYFNGKENSREWQEFKARVETSRFPRSKKQRILLQKFDEDGFKERNLNDTRYVNRFLCQFVADRMRLTGKGKKRVFASNGQITNLLRGFWGLHKVRAENDRHHALDAVVVACSTIAMQQKITRFVRYKEMNAFDGKTIDKETGEVLHQKAHFPQPWEFFAQEVMIRVFGKPDGKPEFEEADTPEKLRTLLAEKLSSRPEAVHEYVTPLFVSRAPNRKMSGQGHMETVKSAKRLDEGISVLRVPLTQLKLKDLEKMVNRAREPKLYEALKARLEAHKDDPAKAFAEPFYKYDKAGNRTQQVKAVRVEQVQKTGVWVRNHNGIADNATMVRVDVFEKAGKYYLVPIYSWQVAKGILPDRAVVAYADEEDWTVIDESFRFKFVLYSNDLIKVQLKKDSFLGYFSGLDRATGAISLREHDLEKSKGKDGMHRIGVKTALSFQKYQIDEMGKEIRPCRLKKRPPVR

SEQ ID NO: 570 - protein, 1082 aa, Neisseria meningitidis
MAAFKPNPINYILGLDIGIASVGWAMVEIDEEENPIRLIDLGVRVFERAEVPKTGDSLAMARRLARSVRRLTRRRAHRLLRARRLLKREGVLQAADFDENGLIKSLPNTPWQLRAAALDRKLTPLEWSAVLLHLIKHRGYLSQRKNEGETADKELGALLKGVANNAHALQTGDFRTPAELALNKFEKESGHIRNQRGDYSHTFSRKDLQAELILLFEKQKEFGNPHVSGGLKEGIETLLMTQRPALSGDAVQKMLGHCTFEPAEPKAAKNTYTAERFIWLTKLNNLRILEQGSERPLTDTERATLMDEPYRKSKLTYAQARKLLGLEDTAFFKGLRYGKDNAEASTLMEMKAYHAISRALEKEGLKDKKSPLNLSSELQDEIGTAFSLFKTDEDITGRLKDRVQPEILEALLKHISFDKFVQISLKALRRIVPLMEQGKRYDEACAEIYGDHYGKKNTEEKIYLPPIPADKIRNPVVLRALSQARKVINGVVRRYGSPARIHIETAREVGKSFKDRKEIEKRQEENRKDREKAAAKFREYFPNFVGEPKSKDILKLRLYEQQHGKCLYSGKEINLVRLNEKGYVEIDHALPFSRTWDDSFNNKVLVLGSENQNKGNQTPYEYFNGKDNSREWQEFKARVETSRFPRSKKQRILLQKFDEDGFKECNLNDTRYVNRFLCQFVADHILLTGKGKRRVFASNGQITNLLRGFWGLRKVRAENDRHHALDAVVVACSTVAMQQKITRFVRYKEMNAFDGKTIDKETGKVLHQKTHFPQPWEFFAQEVMIRVFGKPDGKPEFEEADTPEKLRTLLAEKLSSRPEAVHEYVTPLFVSRAPNRKMSGAHKDTLRSAKRFVKHNEKISVKRVWLTEIKLADLENMVNYKNGREIELYEALKARLEAYGGNAKQAFDPKDNPFYKKGGQLVKAVRVEKTQESGVLLNKKNAYTIADNGDMVRVDVFCKVDKKGKNQYFIVPIYAWQVAENILPDIDCKGYRIDDSYTFCFSLHKYDLIAFQKDEKSKVEFAYYINCDSSNGRFYLAWHDKGSKEQQFRISTQNLVLIQKYQVNELGKEIRPCRLKKRPPVR

SEQ ID NO: 571 - protein, 1082 aa, Neisseria meningitidis
MAAFKPNPINYILGLDIGIASVGWAMVEIDEEENPIRLIDLGVRVFERAEVPKTGDSLAMARRLARSVRRLTRRRAHRLLRARRLLKREGVLQAADFDENGLIKSLPNTPWQLRAAALDRKLTPLEWSAVLLHLIKHRGYLSQRKNEGETADKELGALLKGVANNAHALQTGDFRTPAELALNKFEKESGHIRNQRGDYSHTFSRKDLQAELILLFEKQKEFGNPHVSGGLKEGIETLLMTQRPALSGDAVQKMLGHCTFEPAEPKAAKNTYTAERFIWLTKLNNLRILEQGSERPLTDTERATLMDEPYRKSKLTYAQARKLLGLEDTAFFKGLRYGKDNAEASTLMEMKAYHAISRALEKEGLKDKKSPLNLSSELQDEIGTAFSLFKTDEDITGRLKDRVQPEILEALLKHISFDKFVQISLKALRRIVPLMEQGKRYDEACAEIYGDHYGKKNTEEKIYLPPIPADEIRNPVVLRALSQARKVINGVVRRYGSPARIHIETAREVGKSFKDRKEIEKRQEENRKDREKAAAKFREYFPNFVGEPKSKDILKLRLYEQQHGKCLYSGKEINLVRLNEKGYVEIDHALPFSRTWDDSFNNKVLVLGSENQNKGNQTPYEYFNGKDNSREWQEFKARVETSRFPRSKKQRILLQKFDEDGFKECNLNDTRYVNRFLCQFVADHILLTGKGKRRVFASNGQITNLLRGFWGLRKVRAENDRHHALDAVVVACSTVAMQQKITRFVRYKEMNAFDGKTIDKETGKVLHQKTHFPQPWEFFAQEVMIRVFGKPDGKPEFEEADTPEKLRTLLAEKLSSRPEAVHEYVTPLFVSRAPNRKMSGAHKDTLRSAKRFVKHNEKISVKRVWLTEIKLADLENMVNYKNGREIELYEALKARLEAYGGNAKQAFDPKDNPFYKKGGQLVKAVRVEKTQESGVLLNKKNAYTIADNGDMVRVDVFCKVDKKGKNQYFIVPIYAWQVAENILPDIDCKGYRIDDSYTFCFSLHKYDLIAFQKDEKSKVEFAYYINCDSSNGRFYLAWHDKGSKEQQFRISTQNLVLIQKYQVNELGKEIRPCRLKKRPPVR

SEQ ID NO: 572 - protein, 1082 aa, Neisseria meningitidis
MAAFKPNPINYILGLDIGIASVGWAMVEIDEEENPIRLIDLGVRVFERAEVPKTGDSLAMARRLARSVRRLTRRRAHRLLRTRRLLKREGVLQAANFDENGLIKSLPNTLWQLRAAALDRKLTPLEWSAVLLHLIKHRGYLSQRKNEGETADKELGALLKGVAGNAHALQTGDFRTPAELALNKFEKESGHIRNQRGDYSHTFSRKDLQAELNLLFEKQKEFGNPHISDGLKEGIETLLMTQRPALSGDAVQKMLGHCTFEPTEPKAAKNTYTTERFIWLTKLNNLRILEQGSERPLTDTERATLMDEPYRKSKLTYAQARKLLELDDIAFFKGLRYGKDNAEASTLMEMKAYHAISRALEKEGLKDKKSPLNLSPELQDEIGTAFSLFKTDEDITGRLKDRIQPEILEALLKHINFDKFVQISLKALRRIVPLMEQGKRYDEACAEIYGDHYGKKNTEEKIDLPPIPADEIHNPVVLRALSQARKVINGVVRRYGSPARIHIETAREVGKSFKDRKEIEKRQEENRKDREKAAAKFREYFPNFVGEPKSKDILKLRLYEQQHGKCLYSGKEINLGRLNEKGYVEIDHALPFSRTWDDSFNNKVLVLGSENQNKGNQTPYEYFNGKDNSREWQEFKARVETSRFPRSKKQRILLQKFDEDGFKERNLNDTRYVNRFLCQFVADRMRLTGKGKKRVFASNGQITNLLRGFWGLRKVRAENDRHHALDAVVVACSTVAMQQKITRFVRYKEMNAFDGKTIDKETGEVLHQKTHFPQPWEFFAQEVMIRVFGKPDGKPEFEEADTPEKLRTLLTEKLSSRPEAVHEYVTPLFVSRAPNRKMSGQGHMETVKSAKRLDEGISVLRVPLTQLKLKDLEKMVNREREPKLYEALKARLEAHKDDPAKAFAEPFYKYDKAGNRTQQVKAMRVEQVQKTGVWVRNHNGIADNATMVRVDVFEKGDKYYLVPIYSWQVAKGILPDRAVVQGKDEEDWQLIDDSFNFKFSLHPNDLVEVITKKARMFGYFASCHRGTGNINIRIHDLDHKIGKNGILEGIGVKTALSFQKYQIDELGKEIRPCRLKKRPPVR

SEQ ID NO: 573 - protein, 1082 aa, Neisseria meningitidis
MAAFKPNPINYILGLDIGIASVGWAMVEIDEEENPIRLIDLSVRVFERAEVPKTGDSLAMARRLARSVRRLTRRRAHRLLRARRLLKREGVLQAADFDENGLIKSLPNTPWQLRAAALDRKLTPLEWSAVLLHLIKHRGYLSQRKNEGETADKELGALLKGVADNAHALQTGDFRTPAELALNKFEKESGHIRNQRGDYSHTFSRKDLQAELILLFEKQKEFGNPHVSGGLKEGIETLLMTQRPALSGDAVQKMLGHCTFEPAEPKAAKNTYTAERFVWLTKLNNLRILEQGSERPLTDTERATLMDEPYRKSKLTYAQARKLLGLEDTAFFKGLRYGKDNAEASTLMEMKAYHAISRALEKEGLKDKKSPLRLSPELQDEIGTAFSLFKTDEDITGRLKDRVQPEILEALLKHISFDKFVQISLKALRRIVPLMEQGKRYDEACAEIYGDHYGKKNAEEKIYLPPIPADEIRNPVVLRALSQARKVINGVVRRYGSPARIHIETAREVGKSFKDRKEIEKRQEENRKDREKAAAKFREYFPNFVGEPKSKDILKLRLYEQQHGKCLYSGKEINLGRLNEKGYVEIDHALPFSRTWDDSFNNKVLVLGSENQNKGNQTPYEYFNGKDNSREWQEFKARVETSRFPRSKKQRILLQKFDEDGFKERNLNDTRYVNRFLCQFVADRMRLTGKGKKRVFASNGQITNLLRGFWGLRKVRAENDRHHALDAVVVACSTVAMQQKITRFVRYKEMNAFDGKTIDKETGEVLHQKTHFPQPWEFFAQEVMIRVFGKPDGKPEFEEADTPEKLRTLLAEKLSSRPEAVHEYVTPLFVSRAPNRKMSGQGHMETVKSAKRLDEGVSVLRVPLTQLKLKDLEKMVNREREPKLYEALKARLEAHKDDPAKAFAEPFYKYDKAGNRTQQVKAVRVEQVQKTGVWVRNHNGIADNATMVRVDVFEKGDKYYLVPIYSWQVAKGILPDRAVVQGKDEEDWQLIDDSFNFKFSLHPNDLVEVITKKARMFGYFASCHRGTGNINIRIHDLDHKIGKNGILEGIGVKTALSFQKYQIDELGKEIRPCRLKKRPPVR

SEQ ID NO: 574 - protein, 1082 aa, Neisseria meningitidis
MAAFKPNSINYILGLDIGIASVGWAMVEIDEEENPIRLIDLGVRVFERAEVPKTGDSLAMARRLARSVRRLTRRRAHRLLRTRRLLKREGVLQAANFDENGLIKSLPNTPWQLRAAALDRKLTPLEWSAVLLHLIKHRGYLSQRKNEGETADKELGALLKGVAGNAHALQTGDFRTPAELALNKFEKESGHIRNQRSDYSHTFSRKDLQAELILLFEKQKEFGNPHVSGGLKEGIETLLMTQRPALSGDAVQKMLGHCTFEPAEPKAAKNTYTAERFIWLTKLNNLRILEQGSERPLTDTERATLMDEPYRKSKLTYAQARKLLGLEDTAFFKGLRYGKDNAEASTLMEMKAYHAISRALEKEGLKDKKSPLNLSPELQDEIGTAFSLFKTDEDITGRLKDRIQPEILEALLKHISFDKFVQISLKALRRIVPLMEQGKRYDEACAEIYGDHYGKKNTEEKIYLPPIPADEIRNPVVLRALSQARKVINGVVRRYGSPARIHIETAREVGKSFKDRKEIEKRQEENRKDREKAAAKFREYFPNFVGEPKSKDILKLRLYEQQHGKCLYSGKEINLGRLNEKGYVEIDHALPFSRTWDDSFNNKVLVLGSENQNKGNQTPYEYFNGKDNSREWQEFKARVETSRFPRSKKQRILLQKFDEDGFKERNLNDTRYVNRFLCQFVADRMRLTGKGKKRVFASNGQITNLLRGFWGLRKVRAENDRHHALDAVVVACSTVAMQQKITRFVRYKEMNAFDGKTIDKETGEVLHQKTHFPQPWEFFAQEVMIRVFGKPDGKPEFEEADTLEKLRTLLAEKLSSRPEAVHEYVTPLFVSRAPNRKMSGQGHMETVKSAKRLDEGVSVLRVPLTQLKLKDLEKMVNREREPKLYEALKARLEAHKDDPAKAFAEPFYKYDKAGNRTQQVKAVRVEQVQKTGVWVRNHNGIADNATMVRVDVFEKGDKYYLVPIYSWQVAKGILPDRAVVQGKDEEDWQLIDDSFNFKFSLHPNDLVEVITKKARMFGYFASCHRGTGNINIRIHDLDHKIGKNGILEGIGVKTALSFQKYQIDELGKEIRPCRLKKRPPVR

SEQ ID NO: 575 - protein, 67 aa, Neisseria meningitidis
MFGYFASCHRGTGNINIRIHDLDHKIGKNGILEGIGVKTALSFQKYQIDELGKEIRPCRLKKRPPVR

SEQ ID NO: 576 - protein, 220 aa, Neisseria mucosa
MRHIFSDGLKEGIETLLMTQRPALSGDAVQKMLGHCTFEPTEPKAAKNTYTAERFIWLTKLNNLRILEQGSERPLTNTERATLMDEPYRKSKLTYAQARKLLGLKDTAFFKGLRYGKDNAEASTLMEMKAYHAISRALEKEGLKDKKSPLNLSPELQDEIGTAFSLFKTDEDITGRLKTELTPASNKTLSRPFTVKSASNGSTSAPWLPSTKWFLHFKPA

SEQ ID NO: 577 - protein, 392 aa, Neisseria sp.
MAPFTLKPLNYILGLDIGIASVGWAVVETDSDVLPYRLIDVGVRTFDRAEVPKTGESPAAARRLARSVRRMIRRRAHRMLRARRLLKREGMLQAADFDAHGLVENLPVNPWQLRVDALSRKLMPLEWAAVLLHMVKHRGYLSQRKNERNSSDKELGALLSGVAANSEALQGGDFRTPAELAVNKFEKESGHIRNQRGDYSHTFNRKDVQAELVLLFEKQKEYGNPYISDGLLTGVEDLLMTQRAALSGDAVQKMLGRCTFEPEEYKAAKNTYSAERFVWLTKLNNLRILDQGSERPLTDSERAKLMDEPYKKTKLTYAQVRRLLELDDTAFFKGLRYSKDNAESATLMEMKAYHSISGALEKAGLKNKKIAAGLIARIAGRNRRGVFAIQNR

SEQ ID NO: 578 - protein, 701 aa, Neisseria sp.
MQDEIGEAFSLFKTDEDIRGRLKGKLPDEQLDALLEYVSFDKFVQLSLKALRKILPLMEQGKRYDEACAEIYGDHYGIKDDKQAQFLPPVSADEIRNPVVLRALSQARKVVNAVVRRYGSPARVHIETAREVGKSFLDRKKIEKRQEENRKDRERSIAKFREYFPNFVGEPKAKDILKMRLYEQQQGQCLYSGKAIDLRRLNEKGYVEIDHALPFSRTWDDSFNNKVLVLAGENQNKRNQTPFEWLGGDEKRWREFTARVEHCRFPRSKKQRILMQKLDEKDFKERNLNDTRYVNRFLCNFIAQNMLLTGEDKNRVFASNGQITNLLRGMWGLKKVRESNDRHHALDAVVVACSTVAMQQKITNYVRQKEMNVFDGEMVDKTTGEVSRLHFPQPWDFFRQEVMMRVFGKPDTPSENNEEADTPEKLRALLADKLSSRPEAVHEAVTPLFVSRAPSRKMSGQGHMETIKSAKRLSEGKSVLRVPLTQLTPKLLENMVNREREPQLYEDLLGRLNAHGGDPAKAFAAPFFKRDKAGNPTQQVKAVRVEDVQKSGVIVREGNGVADNATMVRVDVFEKGGKYYLMPIYTWQAAKGILPNKAVIAHTDEANWQEMDTSFTFKFALYPNDLVLASLKKETYFGYFAGLDRSTGNISLRVHDLEKSKGKDGVYRIGVKTALSFQKYQVDELGKTIRPCRLKKRPPVR

SEQ ID NO: 579 - protein, 1089 aa, Neisseria sp.
MTAFKPNPLNYILGLDIGIASVGWAMVEIDDKENPVRLIDLGVRVFERAEMPKTGDSLAAARRLARSVRRLTRRRAHRLLRARRLLKHEGVLKPEDFDENGLVKPLPYIPKQPRNTPWQLRAAALDRKLTPLEWAAVLLHLVKHRGYLSQRKNEGETDDKELGALLKGVADNTHALQAGNFRTPAELALNKFEKESGHIRNQRGDYSHTFSRKDLQAELVLLFEKQKEFGNPYVSDDLKNGIENLLMTQRPALSGDAIQKMLGHCTFEPAEPKAAKNTYTAERFIWLTKLNNLRILNQGNERPLTDAERTTLMDEPYKKSKLTYAQARKLLDLDDTAFFKGLRYGKDNAESATLMEMKAYHAISRALEKEGLKDKKSPLSLSPELQDEIGTAFSLFKTDEEITGRLKGCLQPEILDALLKHISFDKFVQISLKALRRIVPLMEQGKRYDEACAEIYGDHHGRRNSEETLYLPPIPADEIRNPVVLRALSQARKVINGVGRRYGSPARIHIETAREVGKSFKDRKEIEKRQEENRKDREKAAAEFQEYFPNFVGEPKSKDILKLRLYRQQNCKCLYSGKEINLGRLNEKGYVEIDHALPFSRTWDDSFNNKVLVLGSENQNKGNRTPYEYLNGKDNSREWQEFKARVETSRFPHSKKQRILLQKFDEEGFKERNLNDTRYVNRFLCKFVADHMQLTGKGKRRVFASNGQITNLLRGFWGLRKVRAENDRHHALDAVVVACSTVAMQQRITRFVRYKEMNAFDGKTVDKETGEVLHQKTHFPQPWEFFAQEVMIRVFGKPDGKPELEEADTPEKLRALLAEKLSSRPEAVHEYVAPLFVSRAPNRKMSGQGHMETIKSPKRLDEGISVVRVPLTQLKLKDLEKMVNREREPKLYEALKARLEAHKDDPAKAFAEPFYKQDKAGNRTQQVKAVRIEQVQKTGVWVRNQNGIADNATMVRVDVFEKGGKYYLVPIYSWQVAKGILPDKAIIAFKDEEEWQLIDDSFNFKFPLHPNDLVEVITKKARIFGYFASCHRGTGNINIRIHDLDNKVGKNGILEGIGVKTALSFQKYQIDELGKEIRPCRLKKRPPVR

SEQ ID NO: 580 - protein, 1097 aa, Neisseria wadsworthii
MKKQPQRYILGLDLGIASVGWALILVDGAENPVGLLDCGVRTFERAEVPKTGDSLALARRQARSVRRLIRRRAHRLLRLRRLLKREGILSAADFNSDGLPNLPIDAWQLRVAGLERKLTNQEWAAVLLHLVKHRGYLSQRKSETQTENKELGRLLAGVAENSKLLSESSEQYRTPAELAVKLFAEQSGHLRNKGGEYTHTFNRLDLQKELHLLFERQYALGNPFASAELQSKVDELLMTQRSALQGEAVLKMLGKCTFEPSEYKAAKNTYSAERFIWLTKLNNLRILYNGEERALDEGDRKKLLDEPYKKAKLTYKQVRSILNLPESAVFKGLRYGKDSDGLKAENGTLMEMKAYHKIRTILDKAGLKGEWENRIRNPEILDKIGTAFSLYKTDEDIQAALADLRLPENVLDALLAGLNFDKFIQLSLKALRNILPLMERGIRYDEACKEVYGDHRALAESKNQVLLPPIPADEIRNPVVLRTLTQARKVINAIIRRYGSPQRVHIETARELGKSKQERDKIDRKNKENQNDRNRLASDIRKHFNFEPTPKDILKLRLYEQQHGKCLYSDLREEKGECLYTGNVIELHRLFEDGYVEIDHALPLSRTWDNSLNNKVLVLKSSNQNKGNKTPYEWLDGANNSRRWREFQARVQGCHFPYVKKQRIQTAKLDSKAEQGFLERNLNDTRYISKFMCQFITANLRLAETSNALMEEVAGENPYWKERKRQRVFAPSGSIIALLRGLWGLKKVREDNDRHHALDAIVVACSTVSMQQKITKAMQRRETLETVDSETGEVKTRIPQPWDFFRQEVMIRVFSDSPREELAEKLNSRPEALHDFVSPLFVSRAPNRKMTGQGHLETVKSAKRLSENISVVRKPLTALKLKDIENIVGYPDREPALYQALRERLLAHKDDPVKAFADKPFYKPAKDGGQGSLVKAVRIIENTKHGLKIRNGITDTNGDMVRTDVYQKTDKKGKRQYFIVPVYAWQVEKNELPTVDCKGYEIDDNYEFCFSLYKYDLIEIQNPNDINQELRAYYINCDSSDGRFWLAYHDKSAKEQQFRISTQNQPIIKKYQVDTLGKEIRLCKAEKRTALNGKKKK

SEQ ID NO: 581 - protein, 1426 aa, Niabella soli
MPRKNILGLDLGTTSIGFAKIIEDDDYQCSSVELIGVRVNPLTTDEQTNFEKGKPVSVNADRTLKRGMRRNLDRYQLRRDYLIEILRTHHIITADTKLAEDGKNTTHTTYALRALAATAEIPLEAFVRVLLAINKKRGYKSSRKAKNEDEGQLIDGMAIARRLYEESLTPGQFSYQLLKEGKKYLPDFYRSDLNTELNKVWNFQKQFYPEILTDEFKRHLEGKGQRATAVAFWGQHGFSMAENKGSREEKKLHAYKWRSEAAHKQLTKEEVAFVITEINNDLNKSSGYLGAISDRSKELFFNKQTVGQYLHQQLKENPHTRLKGQVFYRQDYLDEFETIWEMQAKFYSALTLELKEEVRDVVIFYQRKLKSQMGLISLCEFESKEIEIEKNGEKAKKRIGLRVAPKSSPLFQEFKIWQVLNNLEFRNKKTKEVFVPEMAAKQQLFDELNIKGNLLASEAIKILGYKTKDWEANYHTLEGNRTNKSLYDAWLKILELEGYDENLLKLSGSDDIDVSKIEKPALEIRQMVLAVFEVLGISGAILDFDAEADGKAFEQQPAYQLWHLLYSAEDDGKKYSQEDIFTYGHDNIGLKKKLCEKFGFRPEHTKILVNVVFSDDYGNLSSKAMRRIYPFIKELTYDKACAEAGYRHSAASLTKEEIAARPLQNRLDLLKKNELRSPVVEKILNQMVNVVNTLVDDENQNRKARGLSEDFHFDEIRIELARELKKNAKERAEMTTNINTAKQSHEKIIRILQTEFGVPNPSRNDIVRYKLYEELKNNGYKDLYTNTYISRDILFSKQIDVDHIIPQMSLFDDSFSNKTVVFRKDNQDKGNKTAYDYILGKYGEQALEEYISRITSLFELGKKNKEEGIGKAKFQKLQKRLVDIGDGFIERDLRESQYIAKKANNMLYAICRSVVSTSGEITARLREDWDLVNVMQEINLPKFRALGLTEMVEKKDGAQKERITDWTKRNDHRHHAMDALAIAFTRHSHIQYLNHLNARKDEANKWHPVVSKIEEKETVLIYDDLGNRKRKFKAPMPNFREVVKEHLENVLISHKAKNKVVTKNKNKIKTVRGEKVKTELTPRGQLHKETIYGRYRYYESKEEKIGPKFDAEMIGMVTNPQYKKLLLERLAANGNDPKKAFWGKNALNKNPLYVDEARQELLPEKILLRWLNDDYSIRKDVTPENLKDIKTIEKILDKGVKKILLKRLADFGNDPKKAFSDLDKNPIWQNEAKRIAIKRVTISGIKNAAPLHHKKDHLGNDILDEKGKQIPSSFVSTGNNHHVAIYRDAEGNLQERVVSLFDAVQLVNGGEPVIDKEYNKGIGWQFLFTMKQNEMFVFPDEKTGFNPREVDLLSSGNRKLISPNLFRVQKLASKNYFFRHHLETSVEEKKELKNIAYKPQLGLNALSNIVKVRINHIGEIVSVGEY

SEQ ID NO: 582 - protein, 79 aa, Nitritalea halalkaliphila
MPLRLPERVYKMISSTGAECHFLPVNVSSLIKGYDAKSKLGEFGSQNKQEVTSDSFIRVKERCYKLEINRLGIPLNRLK

SEQ ID NO: 583 - protein, 1498 aa, Odoribacter laneus
METTLGIDLGTNSIGLALVDQEEHQILYSGVRIFPEGINKDTIGLGEKEESRNATRRAKRQMRRQYFRKKLRKAKLLELLIAYDMCPLKPEDVRRWKNWDKQQKSTVRQFPDTPAFREWLKQNPYELRKQAVTEDVTRPELGRILYQMIQRRGFLSSRKGKEEGKIFTGKDRMVGIDETRKNLQKQTLGAYLYDIAPKNGEKYRFRTERVRARYTLRDMYIREFEIIWQRQAGHLGLAHEQATRKKNIFLEGSATNVRNSKLITHLQAKYGRGHVLIEDTRITVTFQLPLKEVLGGKIEIEEEQLKFKSNESVLFWQRPLRSQKSLLSKCVFEGRNFYDPVHQKWIIAGPTPAPLSHPEFEEFRAYQFINNIIYGKNEHLTAIQREAVFELMCTESKDFNFEKIPKHLKLFEKFNFDDTTKVPACTTISQLRKLFPHPVWEEKREEIWHCFYFYDDNTLLFEKLQKDYALQTNDLEKIKKIRLSESYGNVSLKAIRRINPYLKKGYAYSTAVLLGGIRNSFGKRFEYFKEYEPEIEKAVCRILKEKNAEGEVIRKIKDYLVHNRFGFAKNDRAFQKLYHHSQAITTQAQKERLPETGNLRNPIVQQGLNELRRTVNKLLATCREKYGPSFKFDHIHVEMGRELRSSKTEREKQSRQIRENEKKNEAAKVKLAEYGLKAYRDNIQKYLLYKEIEEKGGTVCCPYTGKTLNISHTLGSDNSVQIEHIIPYSISLDDSLANKTLCDATFNREKGELTPYDFYQKDPSPEKWGASSWEEIEDRAFRLLPYAKAQRFIRRKPQESNEFISRQLNDTRYISKKAVEYLSAICSDVKAFPGQLTAELRHLWGLNNILQSAPDITFPLPVSATENHREYYVITNEQNEVIRLFPKQGETPRTEKGELLLTGEVERKVFRCKGMQEFQTDVSDGKYWRRIKLSSSVTWSPLFAPKPISADGQIVLKGRIEKGVFVCNQLKQKLKTGLPDGSYWISLPVISQTFKEGESVNNSKLTSQQVQLFGRVREGIFRCHNYQCPASGADGNFWCTLDTDTAQPAFTPIKNAPPGVGGGQIILTGDVDDKGIFHADDDLHYELPASLPKGKYYGIFTVESCDPTLIPIELSAPKTSKGENLIEGNIWVDEHTGEVRFDPKKNREDQRHHAIDAIVIALSSQSLFQRLSTYNARRENKKRGLDSTEHFPSPWPGFAQDVRQSVVPLLVSYKQNPKTLCKISKTLYKDGKKIHSCGNAVRGQLHKETVYGQRTAPGATEKSYHIRKDIRELKTSKHIGKVVDITIRQMLLKHLQENYHIDITQEFNIPSNAFFKEGVYRIFLPNKHGEPVPIKKIRMKEELGNAERLKDNINQYVNPRNNHHVMIYQDADGNLKEEIVSFWSVIERQNQGQPIYQLPREGRNIVSILQINDTFLIGLKEEEPEVYRNDLSTLSKHLYRVQKLSGMYYTFRHHLASTLNNEREEFRIQSLEAWKRANPVKVQIDEIGRITFLNGPLC

SEQ ID NO: 584 - protein, 1389 aa, Oenococcus kitaharae; identical to SEQ ID NO: 241

SEQ ID NO: 585 - protein, 1535 aa, Ornithobacterium rhinotracheale
MNTILGLDLGTNSIGWALIKVLNDKTRLPLEIIDLGVVVIPTDQRTLDKFSKGESISKTAERTKQKGVRKLYERKKLRRERLHRVLNILGFLPEHYSKKIDFKKHLGQFFGNSQPKISYVENDHGKHEFIFMDSYREMLKEFSKHNIKNVPYDWTIYYLRKKALSQKISKEELAWVILNFNKKRGYYQFRDDNADENKENKIEKYYALKVTNVKKEDAQNYTITLENGWIYKNKSKISLLDWVGSTKEFISTEKFDNKGNIIKKKNGEDDRTLKLVDSEKDWIAIKKSTEDRIENYGKTVGTYLYEHLLKDPNQKLNGELINIIDRKFYKNELKQILEKQKEFHPELLNEDLFQKSIIELYPKNSTRQKELKNKDLCYLLIDDVIYYQRDLKKKNSTINKCSFESREYYLNGEKQIQKINCIAKSKPLYQEFRTLQFIKNLKVYEIIDGLEKDITSKLLPDFETKEHFFEWLNDKEKIDQLQLLSYKCFDLHDNVKNDLIAKGIKRPTEKAIRTELLEKYRWNYSKDNDRNFLLNETRFKILKYLKKVDKKLTLTNEQIESLWLLLYSAKDERELKNGLQKFSEKNKLPKKFSDIFISFPPFKKEYGAYSEKALKKLLSLVRFGKYWSFNKIDNNIQNKIMNILNGEVDDSISDRVREKTILLQDKNDFQDLPLWLASYVAYNRFSEVSEIKYWDSPDKIEFLKQHSIGNPIVEKIINETLKLIKDIWVIHGKSCKNFFSEIHIELSREIKSSSKKRAQITNNNTKNQKLNNLIKSLLIEMASDTKYENVTPYSPSQQEILKIYDEGIYSKEENSEKIKEINKIRNNNKISKSDITKYKLWLEQGYISPYTGKIIPLTKLFTAKYQKEHIIPQTKFFDDSFNNKVICEAEVNKLKDNSLAMNFIKAKGGKAVKLSDGETVTILNQEEYKQLVRTSFKKNSIKLRNLLLEEIPDTFTKRQLNDTKYISKLVLSLLSNIVREKGELESTAKRIVSTNGQITSILRNDWGLNNIWNKLITPRFERLNNINKNKIYGNWENKKGKNVFQINYLNDNLSTLNTKRIDHRHHALDALIVACTTRNHINFLNNQYAKSRNQRHDLRAKLKRRETITTEGSKKQVFKDFIKPWESFTQDALKKLETTIVNFKVNKRIINKTINWYKKWEKQKDGTYKKIQKKQTKGDAWAIRKPLHIDTIYGIVCKKLPLKSALENYKNIIDENLKHKIKELKEVNKFDNNQIINFFKECNFIFEDNNIQKVEVYDFKDNRDKTILSSSRQLIDESFTPKKIGKVLDPTIRNILLKHLNSTKYNNKFDSDGNPIKPEKLAFSPEGLKDLNKNIKHLNNNKEHQPIKRVKLFETLGNKIKVGYTQQKNKKFAETATGTNLFLGIYSDNNKRDFKTIPLILAIQREKEGLNPCPDTDEKGNQLLFSLSPNELVFVPNNEERKNPNLVDFENLSKDQIDRIYKFVSCTGSEAYFVPSRTAKPIIENENGTNNKSQRIIEFNEKTSIKNEKNEPVLIKTICWKIEVNRLGKIIKVIK

SEQ ID NO: 586 - protein, 103 aa, Parabacteroides merdae
MIVYRLFYRFLFKATKLVNFVIHKELKRQIARTGKIKFHSGGCGCQSGNYKMQNFEKGKSITTNADRTLKRSMRRNLYRCKLRRDVLIELLKKVGFIPEKQWK

SEQ ID NO: 587 - protein, 82 aa, Parabacteroides merdae
MSIWKLQYPPLDLKIYNKFLVYSRVNPLTVDEMQNFEKGKSITTNADRTLKRSMRRNLQRYKLRRDVLIELLKKVGFMSEKQ

SEQ ID NO: 588 - protein, 84 aa, Parabacteroides merdae
MSIWKLQYPPLDLKIYNKFLVYSRVNPLTVDEMQNFEKGKSITTNADRTLKRSMRRNLYRCKLRRDVLIELLKKVGFIPEKQWK

SEQ ID NO: 589 - protein, 398 aa, Pasteurella bettyae
MLANENQNKGNLTPYEWLDGKNNSKRWQDFVARVQTCCFSHRKKQHILSHKLDEKSFIERNLNDTRYVARFLCNFIADNMLLTGKGKRKVFASNGQITALLRGRWGLQKVRDDNDRHHALDAVVIACSTVAMQQKITRFVKYEEGNVFSGERIDRETGEIIPLYFPTPWKFFKENVEIRIFSENPKLELENRLPDYPQYNHEFVQPLFVSRMPTRKMTGQGHMETIKSAKRLDEGISVLKVPLTQLKLADLENMVNRERELALYEALKERLELFGNDPAKAFIEPFYKKGGALVKAVRVKKVQKSGVLVRDGNGVADNALMVRVDVFTKGGKYFLVPIYTWQVAKGILPNKAVTANIDEIDWLEMDESYQFIFTMYPNDLVKVKLKKEEFFGYYGGLD

SEQ ID NO: 590 - protein, 610 aa, Pasteurella bettyae
MNMLKPLNYILGLDLGIGSVGWAVVEIDEQGNPLRLIDVGVRTFERAEVAKTGESLALARRLARSSRRLVKRRAARIKKAKRLLKAENILLSVDEILPNDVWQLRVKGLDHKLERQEWAAVLLHLLKRRGYLSQRKNESKSENKELGALLSGVVTNHQILQTDEYRTPAEIAVHKFQAEDGHIRNQRGDYTHTFSRLDLLAEMELLFQRQTELGNLHTSSKLLENLTALLMWQKPALAGEAILKMLGKCTFEPTEYKAAKNSYSAERFVWLTKLNNLRILEQGAERALTDSERFVLLDQPYEKAKLTYAQVRTLLKLSDEAIFKGVRYQGEDKKTVESKTTLMEMKAYHQIRKALDGADLKDEWNTLKNDSALLDEIGTAFSLYKTDDDISHYLGGKLSEKVLNVLLENLNFDKFIQLSLKALQKILPLMLQGQRYDEAVSAVYGDHYGKKSAESCRLLPAIPANEIHNPVVLRTLTQARKVINAVVRLYGSPARIHIETGRKVGKSYQDRKKLEKQQEENREQRESAVKKFKEYFPNFVGEPKGKDILKLRLYELQQSKCLYSGKSFDPNRLLEKGYVEVDHALPFSRTWDDSFNNKVCLPMKTRIKAI

SEQ ID NO: 591 - protein, 199 aa, Pasteurella multocida
MACATPSMQQKITRFIRFKEVHPYKIENRYEMVDQESGEIISPHFPEPWAYFRQEVNIRVFDNHPDTVLKEMLPDRPQANHQFVQPLFVSRAPTRKMSGQGHMETIKSAKRLAEGISVLRIPLTQLKPNLLENMVNKEREPALYAGLKARLAEFNQDPAKAFTTPFYKQGGQQVKAIRVEQVQKSGVLVRENNGVADNA

SEQ ID NO: 592 - protein, 63 aa, Pasteurella multocida
MQTTNLSYILGLDLGIASVGWAVVEINENEDPIGLIDVGVRIFERAEVPKTGESLALSRRLAR

SEQ ID NO: 593 - protein, 1058 aa, Pasteurella multocida
MQTTNLSYILGLDLGIASVGWAVVEINENEDPIGLIDVGVRIFERAEVPKTGESLALSRRLARSTRRLIRRRAHRLLLAKRFLKREGILSTTDLEKGLPNQAWELRVAGLERRLSAIEWGAVLLHLIKHRGYLSKRKNESQTNNKELGALLSGVAQNHQLLQSDDYRTPAELALKKFAKEEGHIRNQRGAYTHTFNRLDLLAELNLLFAQQHQFGNPHCKEHIQQYMTELLMWQKPALSGEAILKMLGKCTHEKNEFKAAKHTYSAERFVWLTKLNNLRILEDGAERALNEEERQLLINHPYEKSKLTYAQVRKLLGLSEQAIFKHLRYSKESAESATFMELKAWHAIRKALENQGLKDTWQDLAKKPDLLDEIGTAFSLYKTDEDIQQYLEGKLPDSVINALLVSLNFDKFIELSLKSLRKILPLMEQGKRYDQACHEIYGHHYGEKNQQISQLLPVIPTQEIRNPVVLRTLSQARKVINAIIRQYGSPARVHIETGRELGKSFKERREIQKQQEDNRTKRESAVQKFKELFSDFSSEPKSKDILKFRLYEQQHGKCLYSGKEINIHRLNEKGYVEIDHALPFSRTWDDSFNNKVLVLASENQNKGNQTPYEWLQGKINSERWKNFVALVLGSQCSAAKKQRLLTQVIDDNKFIDRNLNDTRYIARFLSNYIQENLLLVGKNKKNVFTPNGQITALLRSRWGLIKVRENNDRHHALDAIVVACATPSMQQKITRFIRFKEVHPYKIENRYEMVDQESGEIISPHFPEPWAYFRQEVNIRVFDNHPDTVLKEMLPDRPQANHQFVQPLFVSRAPTRKMSGQGHMETIKSAKRLAEGISVLRIPLTQLKPNLLENMVNKEREPALYVGLKARLAEFNQDPAKAFATPFYKQGGQQVKAIRVELVQKSGVLVRQGNGVADNAPGSIVRTDVFIKNNKFFLVPIYTWQVAKGILPNKAIVAHKNEDEWEEMDEGAKFKFSIFPNDLIELRTKTECFLGYYIGPDRHNGSISLREHDSEISKGNAGVYRVGVKLALSLEKYHIDELGKNRRICRPHQRRPVR

SEQ ID NO: 594 - protein, 1056 aa, Pasteurella multocida
MQTTNLSYILGLDLGIASVGWAVVEINENEDPIGLIDVGVRIFERAEVPKTGESLALSRRLARSTRRLIRRRARRLLLAKRFLKREGILSTTDLEKGLPNQAWELRVAGLERRLSAIEWGAVLLHLIKHRGYLSKRKNESQTNNKELGALLSGVAQNHQLLQSDDYRTPAELALKKFAKEEGHIRNQRGAYTHTFNRLDLLAELNLLFAQQHQFGNPHCKEHIQQYMTELLMWQKPALSGEAILKMLGKCTHEKNEFKAAKHTYSAERFVWLTKLNNLRILEDGAERALNEEERQLLINHPYEKSKLTYAQVRKLLGLSEQAIFKHLRYSKENAESATFMELKAWHAIRKALENQGLKDTWQDLAKKPDLLDEIGTAFSLYKTDEDIQQYLTNKVPNSVINALLVFLNFDKFIELALKSLRKILPLMEQGKRYDQACREIYGHHYGEANQKTSQLLPAIPAQEIRNPVVLRTLSQARKVINAIIRQYGSPARVHIETGRELGKSFKERREIQKQQEDNRTKRESAVQKFKELFSDFSSEPKSKDILKFRLYEQQHGKCLYSGKEINIHRLNEKGYVEIDHALPFSRTWDDSFNNKVLVLASENQNKGNQTPYEWLQGKINSERWKNFVALVLGSQCSAAKKQRLLTQVIDDNKFIDRNLNDTRYIARFLSNYIQENLLLVGKNKKNVFTPNGQITALLRSRWGLIKIRENNDRHHALDAIVVACATPSMQQKITRFIRFKEVHPYKIENRYEMVDQESGEIISPHFPEPWAYFRQEVNIRVFDNHPDTVLKEMLPDRPQANHQFVQPLFVSRAPTRKMSGQGHMETIKSAKRLAEGISVLRIPLTQLKPNLLENMVNKEREPALYAGLKARLAEFNQDPAKAFTTPFYKQGGQQVKAIRVEQVQKSGVLVRENNGVADNASIVRTDVFIKNNKFFLVPIYTWQVAKGILPNKAIVAHKNEDEWEEMDEGAKFKFSLFPNDLVELKTKKEYFFGYYIGLDRATGNISLKEHDGEISKGKDGVYRVGVKLALSFEKYQVDELGKNRQICRPQQRQPVR

SEQ ID NO: 595 - protein, 134 aa, Pasteurella multocida
MVNKEREPALYAGLKARLAEFNQDPAKAFTTPFYKQGGQQVKAIRVEQVQKSGVLVRENNGVADNASIVRTDVFIKNNKFFLVPIYTWQVAKGILPNKAIVAHKNEDEWEEMDEGAKFKFSLFPNDLVELKTKK

SEQ ID NO: 596 - protein, 53 aa, Pasteurella multocida
YSKENAESATFMELKAWHAIRKALENQGLKDTWQDLAKKPDLLDEIGTAFSLL

SEQ ID NO: 597 - protein, 1366 aa, Pediococcus acidilactici
MGDRKYNLGLDIGTSSIGFAAVDENNQPIRVKGKTAIGVRLFEEGKTAADRRGFRTTRRRLSRRRWRINLLNEIFDAHLAEVDPTFLARLKESNRSNLDPKKSFQGSLLFPERKDYQFYEEYPTIYHLRKALMEEDRKFDIREIYLAVHHIIKYRGNFLNGTPMRSFKVENIELDTLFDQLNQLYAEIVPDNELAFDLAQVADVKDVLSSTTIYKMDKKKQLVKMMLLPASNKALQSENKKIVTQFVNAILNYKFKLDVLLQVETDADWSLKLNDEGADDKLEEFTGDLDENRLEIIDLLQRLHNWFSLNEITKDGNSLSAAMVEKYENHHHHLGLLKKVIENHPDAKKAKALKETYTAYVGKTDDKTQNQDDFYKAVEKNLDDSPDAKEIKRLIQLDQFMPKQRTGQNGAIPHQLHQQELDQIIEKQSKYYPFLAEPNPNVKRRKDAPYKLDELIAFKIPYYVGPLVTPEEQAQNKENVFAWMKRKAAGPITPWNFDEKVDRMESANRFIRRMTTKDTYLFGEDVLPAESMIYQKFVVLNELNNLKINGRHLSLKDKQDVYNDLFKQQKTVSIKALQNYYVTKKKAATAPTVGGLADPKKFLSSLSTYIDFKNMFGERVNDPQFQEDLEQIVEWSTIFEDRGIFKAKLQALGWLSEKQIQQLVAKRYKGWGRLSKKLLTGLKNAEGYSILDEMWRSTENFMQIQTRPEFAALIQQANEKQFEGNDPNNVWENIESILGDAYTSPQNKKAIRQVVKVVQDIEKAVGNPPEKIAIEFTREAAANPQRTQSRLRTLEKLYESAEEVVDAGLTAELAEFKENKHVLSDKYYLYFTQLGRDVYTGDTISLDKLNDYDVDHILPQSFIKDDSLDNRVLTIRAVNNGKSDNVPAKMFGKKMGSFWRYLLDNGMISKRKYNNLITDPDNISKYAQKGFINRQLVETSQVIKLTANILNGIYDKDTEIIEVPAKMNSQMRKMFDLVKVREVNDYHHAFDAYLTIFIGKYLYKCYPKLRPYFVYGKFKKFGDNEDIEVGDGRFNFLNRIERLKNVTDPETGEILWSNVAPNETIKQIKKVYNYKFMLVSRETTTRRAELFNQTVYPKNYRGKLIPIKEDRPTDLYGGYSGNTDAYLAIVALEDKKKGKYFKVVGIPTRAAAKLEKLKQQDSQQYLQALHKVIAPQFTKSTKKGIKKTEFEIVLDKVHYRQLVQDGPVKMMLGSSTYKYNAKQLVLSEKALQVIADDRKFDETQKDDNLIAVYDEILSIVNQSFDLYDINGFRKKLNDNRDQFIDLPAETKYEGRKVVAHGKREMILEILKGLHANAAFGNLKPIGFSTAFGQLQVPNGIILSKNAILIHQSPSGLFERKIKLSDL

SEQ ID NO: 598 - protein, 1229 aa, Pediococcus acidilactici; identical to SEQ ID NO: 130

SEQ ID NO: 599 - protein, 270 aa, Pediococcus lolii
LFNQTIYSAKASKTMIPIKNDRPTKLYGGYSGNEDAYMSIIRLSDKKKTYKVVGISMRDASKLKAYENNAHEEYLKKLKEVIEQQFLDSGKKTKADFEIVIPKVNYHQRMQDGTKQFRIGSSKYVHNTKQLVLSEKTLKAIRNNKQYNGDAEKDLINAFDEILTIVNDSFSIFDIRSFRKKLNESRDKFVSLPVEDTKEKSKVIKGKRETLKQILIALHANGTSQDIPQLGLKSFGKMVKTGGLTLSENTALIHQSPSGLFEHKIKLSDL

SEQ ID NO: 600 - protein, 1016 aa, Pediococcus lolii
MNGIFDAHLAEVDPTFLARLKESNRSNLDPKKSFQGSLLFPERKDYQFYKEYPTIYHLRKALMEKDRKFDIREIYLAVHHIIKYRGNFLNGTPMRSFKVENIELDTLFDRLNQLYEEIIPDNELAFDLEQVADVKEVLSSTTIYKMDKKKQLVKMMLLPASNKALQSENKKIVTQFVNAILNYKFKLDVLLQVETDADWSLKLNDEGADDKLEEFTGDLDENRLEIIDLLQRLHNWFSLNEITKDGNSLSAAMVEKYKDHRHHLELLKKVIEDHSDAKKAKALKETYTAYVGKTDDKTQNKDDFYKAVEKNLDDSPEAKEIKRLIQLDQFMPKQRTGQNGAIPHQLHQQELDQIIEKQSKYYPFLAEPNPNVKRRKDAPYKLDELIAFKIPYYVGPLVTPEEQAQNKENVFAWMKRKAAGPITPWNFDEKVDRMESANRFIRRMTTKDTYLFGEDVLPAESMIYEKFVVLNELNNLKINGRHLSLKDKQDIYNDLFKQQKTVSIKALQNYYVTKKKAATAPTVGGLADPKKFLSSLSTYIDFKNMFGERVNDPQFQEDLEQIVEWSTIFEDRGIFKAKLQALGWLSEKQIQQLVAKRYKGWGRLSKKLLTGLKNAEGYSILDEMWHSTENFMQIQTRPEFAALIQQANEKQFEGNDPDNVWENIENILGDAYTSPQNKKAIRQVVKVVQDIEKAVGNPPEKIAIEFTREAAANPQRTQSRLRTLEKLYESAEEVVDAGLTAELAEFKENKHVLSDKYYLYFTQLGRDVYTGDTISLDRLNDYDVDHILPQSFIKDDSLDNRVLTIRAVNNGKSDNVPAKMFGKKMGSFWRYLLDNGMISKRKYNNLITDPDNISKYAQKGFINRQLVETSQVIKLTANILNGIYDKDTEIIEVPAKMNSQMRKMFDLVKVREVNDYHHAFDAYLTIFIGNYLYKCYPKLRPYFVYDNFKKFGNKEDIGHKRFNFLGKIERDKKVVAPETGEILWSNVAPNETIKQIKKVYDYKFMLTSHETYTKHG

SEQ ID NO: 601 - protein, 1333 aa, Planococcus antarcticus
MKNYTIGLDIGVASVGWVCIDENYKILNYNNRHAFGVHEFESAESAAGRRLKRGMRRRYNRRKKRLQLLQSLFDSYITDSGFFSKTDSQHFWKNNNEFENRSLTEVLSSLRISSRKYPTIYHLRSDLIESNKKMDLRLVYLALHNLVKYRGHFLQEGNWSEAASAEGMDDQLLELVTRYAELENLSPLDLSESQWKAAETLLLNRNLTKTDQSKELTAMFGKEYEPFCKLVAGLGVSLHQLFPSSEQALAYKETKTKVQLSNENVEEVMELLLEEESALLEAVQPFYQQVVLYELLKGETYVAKAKVSAFKQYQKDMASLKNLLDKTFGEKVYRSYFISDKNSQREYQKSHKVEVLCKLDQFNKEAKFAETFYKDLKKLLEDKSKTSIGTTEKDEMLRIIKAIDSNQFLQKQKGIQNAAIPHQNSLYEAEKILRNQQAHYPFITTEWIEKVKQILAFRIPYYIGPLVKDTTQSPFSWVERKGDAPITPWNFDEQIDKAASAEAFISRMRKTCTYLKGQEVLPKSSLTYERFEVLNELNGIQLRTTGAESDFRHRLSYEMKCWIIDNVFKQYKTVSTKRLLQELKKSPYADELYDEHTGEIKEVFGTQKENAFATSLSGYISMKSILGAVVDDNPAMTEELIYWIAVFEDREILHLKIQEKYPSITDVQRQKLALVKLPGWGRFSRLLIDGLPLDEQGQSVLDHMEQYSSVFMEVLKNKGFGLEKKIQKMNQHQVDGTKKIRYEDIEELAGSPALKRGIWRSVKIVEELVSIFGEPANIVLEVAREDGEKKRTKSRKDQWEELTKTTLKNDPDLKSFIGEIKSQGDQRFNEQRFWLYVTQQGKCLYTGKALDIQNLSMYEVDHILPQNFVKDDSLDNLALVMPEANQRKNQVGQNKMPLEIIEANQQYAMRTLWERLHELKLISSGKLGRLKKPSFDEVDKDKFIARQLVETRQIIKHVRDLLDERFSKSDIHLVKAGIVSKFRRFSEIPKIRDYNNKHHAMDALFAAALIQSILGKYGKNFLAFDLSKKDRQKQWRSVKGSNKEFFLFKNFGNLRLQSPVTGEEVSGVEYMKHVYFELPWQTTKMTQTGDGMFYKESIFSPKVKQAKYVSPKTEKFVHDEVKNHSICLVEFTFMKKEKEVQETKFIDLKVIEHHQFLKEPESQLAKFLAEKETNSPIIHARIIRTIPKYQKIWIEHFPYYFISTRELHNARQFEISYELMEKVKQLSERSSVEELKIVFGLLIDQMNDNYPIYTKSSIQDRVQKFVDTQLYDFKSFEIGFEELKKAVAANAQRSDTFGSRISKKPKPEEVAIGYESITGLKYRKPRSVVGTKR

SEQ ID NO: 602 - protein, 211 aa, Porphyromonas catoniae
MGKKVLGLDLGVGSIGWCLITLDKDEKPQSILGMGSRIVPLSADDATEFTQGKAITKNKMRTVARTIRKGMDRYQLRREALKKVLREHAMLPDEALIKLPLLELWELRARAATPGEQVSLTELGRVLLHINQKRGYKHAKADEAAEAETKKGKETGYVAQVKGRYQILKEKGLTIGQHFAGELRANQQTAPRGTYYTYRIKEQVYPRVRGV

SEQ ID NO: 603 - protein, 1009 aa, Porphyromonas catoniae
MRIIREAYIEEYDRIMAVQRVFYPELLTDALIGRIRDRIIFYQRPLKSCKQLVSFCEFEKKEKVIRVKHTNKEGVQELVEKTITIGPKVAPKSSPIFQVCKVWESIHNIRLYHPDGTERKLEQEEKQKLFDYLQRNDKLSLTTLRKELKIKPKDKLWCDKLLEKGIAGNTTAAILRKAFKGYEHYERLFRFDLVRRDSHEADEDGVIRPIIDESYQNEPLYKLWHILYSIEDRAEMRSALIGQLGIKAEDLDNGLMDALYKIDFVKQGYGNKSAKFICKLLPHLQEGKMYSEAAEAAGMRHSDSMTAQERDERNLLEEIPLLQKNALRQPVVEKVLNQMINLVNALKREHGEIDEVRVELARELKMSREEREKATKNNSSREKENKAIAERITEYGLTPTKSRIQKYRLWQESAESCIYCGKRVDVVQFLRGEETEVEHIIPKSILFDDSLSNKACACRSCNQEKGNRFAMEYIQAKGWEQDYIERVDSLFHDKKISYSKRQHLLMLPKDLPEDFIERHLRLSQYISREAQGILRKGIRLVSASEGGVTAKLRQLWGYDNILRDLNLERYKSMGETEVVTVEHRDGQRTDERIKDWSKRKDHRHHAIDALVVACTRQSYIQRLNRVNAEADRQEMDAFIKEQQQEHKLSKKEKLSLLENWLKEQPHFTTGEVKEHAEGILISFRPGKRTVSRGRNIYKRSGKTDVQRNVLIPRGALSEETVYGVISVDGENKVVCKYPLQKFLDTKETNVDKIADQAAEKIVDKVLREKIRERIKRYGKKEAFAEPLYLDEAQTQVVRSVRCFISKDQAKLIPLRYNDESEAVGFVAPGNNHHLALYRDASGKMRASVVSFFAAVERARYGIPMIVLNPRETREKARIIPDLPESIFSKLPEEDWVLEETLQEGEMVLLGMENDAIEEAIKKKDYSKLSRYLYRVQSLSYNDYKFCFHLETESEKKEKKKGEDKKRGEKAKNTAVMPPKRYRIRCLATYQEDLNPRKVKIDLLGRISLA

SEQ ID NO: 604 - protein, 1197 aa, Porphyromonas sp.
MLMSKHVLGLDLGVGSIGWCLIALDAQGDPAEILGMGSRVVPLNNATKAIEAFNAGAAFTASQERTARRTMRRGFARYQLRRYRLRRELEKVGMLPDAALIQLPLLELWELRERAATAGRRLTLPELGRVLCHINQKRGYRHVKSDAAAIVGDEGEKKKDSNSAYLAGIRANDEKLQAEHKTVGQYFAEQLRQNQSESPTGGISYRIKDQIFSRQCYIDEYDQIMAVQRVHYPDILTDEFIRMLRDEVIFMQRPLKSCKHLVSLCEFEKQERVMRVQQDDGKGGWQLVERRVKFGPKVAPKSSPLFQLCCIYEAVNNIRLTRPNGSPCDITPEERAKIVAHLQSSASLSFAALKKLLKEKALIADQLTSKSGLKGNSTRVALASALQPYPQYHHLLDMELETRMMTVQLTDEETGEVTEREVAVVTDSYVRKPLYRLWHILYSIEEREAMRRALITQLGMKEEDLDGGLLDQLYRLDFVKPGYGNKSAKFICKLLPQLQQGLGYSEACAAVGYRHSNSPTSEEITERTLLEKIPLLQRNELRQPLVEKILNQMINLVNALKAEYGIDEVRVELARELKMSREERERMARNNKDREERNKGVAAKIRECGLYPTKPRIQKYMLWKEAGRQCLYCGRSIEEEQCLREGGMEVEHIIPKSVLYDDSYGNKTCACRRCNKEKGNRTALEYIRAKGREAEYMKRINDLLKEKKISYSKHQRLRWLKEDIPSDFLERQLRLTQYISRQAMAILQQGIRRVSASEGGVTARLRSLWGYGKILHTLNLDRYDSMGETERVSREGEATEELHITNWSKRMDHRHHAIDALVVACTRQSYIQRLNRLSSEFGREDKKKEDQEAQEQQATETGRLSNLERWLTQRPHFSVRTVSDKVAEILISYRPGQRVVTRGRNIYRKKMADGREVSCVQRGVLVPRGELMEASFYGKILSQGRVRIVKRYPLHDLKGEVVDPHLRELITTYNQELKSREKGAPIPPLCLDKDKKQEVRSVRCYAKTLSLDKAIPMCFDEKGEPTAFVKSASNHHLALYRTPKGKLVESIVTFWDAVDRARYGIPLVITHPREVMEQVLQRGDIPEQVLSLLPPSDWVFVDSLQQDEMVVIGLSDEELQRALEAQNYRKISEHLYRVQKMSSSYYVFRYHLETSVADDKNTSGRIPKFHRVQSLKAYEERNIRKVRVDLLGRISLL

SEQ ID NO: 605 - protein, 1422 aa, Prevotella denticola
MTQKVLGLDLGTNSIGSSVRNLDLSDDLKGQLEFFSSDIFRSSVNKESNGREYSLAAQRSAHSRSRGLNEARRRKLWATLDLLIKYGFCPMSPESLMRWRTYDKQRGLFREYPIDDKNFNAWILLDFDGDGKPDYSSPYQLRRELVIRQFDFDQPIERYKLGRALYHIAQHRGFKSSKGETLSQQETNSKQSLTDDTADVAGEMKASEEKLSKGLSTYMKENNLLTVGAAFAQLEDEGVRVRNNNDYRAIRSQFQREIETIFKFQQGLSVENELYERLVSEKKNIGTIFYKRPLRSQRGNVGKCTLERTKPRCAIGHPLFEKFRAWTLINNIKVRMSEEEQAEQLPMKLRFELYNDCFLAFVRAEFKFEDIRKYLEKRLGVHFSYNDKTINYKDSTSVAGCPITARFRKLLGEDWESFHVDGQKQRQAHGKNNASFHTVSYSTNDIWHFCYDAEEPEAVLSFAQDNLKWEKKKAEELVRIWSAIPQGYAMLSQKAIRNINKMLILGLKYSDAVLLAKVPEIVEITDGEILSVTEDYHRVEAQVGYEKQINNIVNALIAKYKSASEEYRFADHNYEYQLDKSDEKDIIKQIESNIGTRKWSLLDADEQTDILQKVRDKYQNFFRSHERKFVESPKLGECFEEYLMKKFPMVEGERWKKLYHPSQIAIYRPVPANKDRSALRLGNPDIGAIKNPTVLRVLNTLRKRVNQLLDDGIISPDETRVVVETARELNDANRKWALDTYNRIRHDENEKIKKILAEFYPKRDNISTVDIDKARYVIDQREMDYFTEAKTYHKDIKKYKLWLEQGGQCMYTGRTINLSNLFDPNSFDVEHTIPESISFDSSDMNLTLCDAHYNRFIKKNHIPADLPNYDKSVVIDGKEYSPIKPRLQRWADRVERLNRNVEYWRGQARRAQNKDRKDQCMREMHLWKMELEYWTKKLERFTITEVTDEFKNSQLVDTRVITRHAVLYLKSIFPHVDVQRGDVTAKFRKILGIQSVDEKKDRSLHSHHAIDATTLTIIPGAAKRERMLELFAKIEEVNKMLSFSGNEDRTGLKQELDGLKNQLNKEVKACRIGHNVSEIGTFINDNIIINHHVKNQALTPVRRRLRKRGHIVGGMDNPRWQTGDALRGEIHKASYYGAITQYAKDKEGKVLMKEGRPQINPTIKFVIRRELKYKKSSTDSGFASWDDLGKAIVDKELFALMKGQFPEGTSFKDACEQGIYMIKKGKNGEVDTKLYRIRHIRCKTKQKNALKIKEQAYKSEKEYKRYFYAAVGDLYAMCCYTNGKTREFKIYSLYDISCHRKVGVEDIPEFITDKKGNRLMLDYKLHTGDMILLYKENPEELYDLDNVSLSKLLYKINGFENDGLRIRMVNHLVAKEAMGESVKDYAKLPDIIRCGVKTIKFLVMGENRDFVIKNGKISFNHR

SEQ ID NO: 606 - protein, 443 aa, Prevotella disiens
MELDYWKGKYNRFTMTEIPEGFSRRQGMGIGLISRYAGLYLKTIFHKKDNPQKSNVYIVKGSITAEFRRIWNIQDDYEKKCRDNHIHHCIDAIVVGCIGKREYDLMAQFYRDEEKYRWEKKKKPFFKKPWETFTQDMLSLKDEVLTVHFNPSNFTKKAHKKVFTPKGIFVAQGDCARVKLHKESYFGAIEQKGEIKYVMRKELSALKIEDIKNIVDAVVKEKVLAVVKKKGFKQAMAEPIYMNEDKRILIKKVRLFVSQTNPLIVKKHRDLSSKEYKQNYYVDNEGNLMIAMYEGVKKNGKIDREITVVNNLEAAKFFRQSQKNNAEKQLISHLSPKNGYPLKTVLTQKQLVLMYEDSPKEIKLRDTKNMVKRLYQVVEIEKDGRVKLKFHQEARSEGLNKNSAAFKIQDTPESLYRHTKSNLKVLVNGVDFKINILGEISLI

SEQ ID NO: 607 - protein, 1375 aa, Prevotella histicola
MKKILGLDLGTTSIGWALVYESENTDEKSSIVRLGVRVNPLSVDEKGNFEKGKAITTNADRQQTHGARINLQRYKLRRENLKDCLQKQGWIGTEALCEEGKTSTFETYMLRAKAAEEEISLHELCRVLFMMNKKRGYKSNRKANNKEDGKLFDGMTVAKKLYEEHLTPAEYSFQLLSSGKKFKQEYYRSDLKEEFDRIWNEQQKYYPEILTDDFKQQLQGKSKGNTSKIFLGKYGIYSADLKGLDRKLQPLKWRVEALKQQVDKEVLAFVISDLNGQIASTSGLLGAISDRSKELYFNKQTVGQYLWTSLKETPHVSIKNKPFYRQDYLDEFEKIWETQATYHKELTPELKQEIRDIIIFYQRPLKSKKGLISVCELEQRKVKVTIDGKEKEISIGPKVAPKSSPMFQEFRIWQNLNNILLIDKGNNSIHPLYEEEKNLLYEELSVKEKLSKAEALKVLNKNSKQWDLNYKEIEGNRTQAVLYDCYNRIIVMTGHEEYNFKKLKASEIRSYVKTTFTGLGFNTDILEFDSSLTGHELEKQPMYQLWHLLYSYESDNSRTGNDALLRKLETAFGFPKEYAAVLSDVVFEDSYGNLSVKAMRKILPHLQAGLNYSQACEEAGYKHSRRSLTKNELDQKEYKEKLELLPKNSLHNPVVEKILNQMINVINAVIDEYGKPDEIRIELARELKIGAAERENMTRSINQGNAENKRIREILEKEFALSYISRNDIIKYKLYEELKSNGFKTLYSDTYISKDKLFSKDFDIEHIIPKARLFDDSLSNKTIEARDVNIAKSNKTAFDFISEKYDQQGIEAYKKKLDILLQDGSISKAKYNRLLMKEADIPSGFIDRDLRDTQYIAKKAYEILSDLVRNVTPTTGAVTSRLREDWQLVDVMKELNFEKYQKLGLVEVIEDRDGRKIKRIKDWTKRNDHRHHAMDALTIAFTKPSYIQYLNNLNARSDKNSSIYGIENKELHREDNKLRFNAPLPINEFRAEARRHLKSILVSVKAKNKVMTQNVNVIKTKHGVIKKVQLTPRGELHNATFYGTKKRPIIKMVKVGAALDEVTIKKVSSSFIREALLDRLHEYNGDAKKAFTGRNSIDKNPIYIDEEHKKTVPALVKTIEWEMYHPTRKLISPDLKIDKVIDKGIREILKTRLAKFNGDAQKAFSNLDENPIYKDEAKKITLKRVSLEGVSSVIPLHTLKDREGKLVVGKDGKPVLGDYVQTSNNHHIAFYMDENGNLQDNVVSFFEAAERKSQGVPVIDKNYNHDKGWNFLFTMKQNEYFVFPNEVTGFNPSEVDLMDEANYSIISPNLYRVQKMSKASGRDYWFRHHLEAMLNDDPKLRNSMFKRITSLKALEGIVKVRINCIGKIVAVGEYD

SEQ ID NO: 608 - protein, 1380 aa, Prevotella intermedia
MKRILGLDLGTTSIGWALVNEAENNNEASSIVRLGVRVNPLTVDEKSNFEKGKAITTNADRQLRHGARINLQRYKLRRQNLHDCLQKQGWLGTEAMYEEGKASTFETYKLRAKAAEEEISLHEFARVLFMLNKKRGYKSNRKANNKEDGQLFDGMTIAKKLYEEHLTPAEYSLQLLNKGKKFTQGYYRSDLNAELERIWDEQKKYYPEILTDEFKQQLEGKTKTNTSKIFLAKYGIYSADLKGLDRKFQPLKWRVEALQQQVDKEVLAFVISDLKGQIANTSGLLGAISDRSKELYFNKQTVGQYLWASLEENPHISIKNKPFYRQDYLDEFEKIWETQAAFHKQLTPELKQEIRDIIIFYQRPLKSKKSLISVCELEQRKVKATIDGKEKEITIGPKVAPKSSPVFQEFRIWQNLNNVLLIDNDTNEKRPLDEVERNLLYKELSIKAKLSKTEALKILNKKGKQWDLNYRELEGNRTQAILFDCYNRIITLTGHEECDFKKIKASEIRHYVSTIFKNLGFSTEILDFDPSLKKHELEKQPMYQLWHLLYSYESDNSRTGNESLLRKLETTFGFPEEYATVLCDVVFEEDYGNLSVKAMREILPYLQAGNDYSQACAYAGYNHSRHSLTKEELDQKVYKERLELLPKNSLRNPVVEKILNQMINVINAIIDEYGKPDEIRIEMARELKSSAADRKKTTHAISQGNAENQRIREILEKEFSLSYISRNDIIKYKLYEELEPNYYKTLYSDTYITKDKLFSKDFDIEHIIPKARLFDDSFSNKTLEARNINLEKSNKTAFDFIKEKYGEDGAEAYKKKLDMLLENDAISRPKYNNLLRAEADIPSDFINRDLRNTQYIAKKACEILGELVKTVTPTTGKITNRLREDWQLVDVMKELNFEKYEKLGLTEIVEDRDGRKIKRIKDWTKRNDHRHHAMDALAIAFTKPSFIQYLNNLNARSNKGDSIYAIENKELHYEEGKLRFNAPIPVNEFRAEAKRHLSAILVSIKAKNKVMTQNVNKIKTKHGIIKKIQLTPRGPLHNETIYGTKMRPIIKMVKVGAALDEATINKVSSPAIREALLKRLNEYSGNAKKAFTGKNTLEKNPIYLNAGRTKTVPSLVKTVEWESFHPTRKLIDKDLNVDKVVDKGIREILKARLEEFNGDAKKAFSNLEENPIYLDEAKKIALKRVSIEGVLSAIPLHTLKNQAGKPITGKDGKPVLGNYVQTSNNHHIAFYYDEDGNLQDNAVSFFEAAERKSQGIPVIDKDYNRDKGWRFLFTMKQNEYFVFPNEATGFIPSEVDLTDEANYGIISPNLYRVQKVSRIDKGTSASRDYWFRHHLETILNDDAKLKNLAFKRIRGLLELKDIIKVRINSTGKIVAVGEYD

SEQ ID NO: 609 - protein, 129 aa, Prevotella multiformis
MQKGGTGCKINRQTVGNVEVNVLNLRLYDRTDDREVTAGYLPTKEDYVRLFVYLNDRKEINQDTLLKDYFRLKKVKCGNEKEFAIRWNYIEDKEKKYPCNETRHELLAALDRAGMEHGWLDDSGTSARW

SEQ ID NO: 610 - protein, 535 aa, Prevotella multiformis
MVKGLLSNIVRTAEEREETSKFVISCTGRITDRLKQDWGLNDVWNSLVYTRFKRLNELTETEAFGHWQDKDRRVFQTSVPLELQRGFSKKRIDHRHHAMDALVIACASRNIIGYLNNESAESPEKREDLRRKLCDKNHIIRKPWESFTQDARAALEDIVVSFKNYVRIINKATNYYERYDADGRKTKAEQKGGEMWAVRKPMHEATYYGKVNLRRKERVSLKAALEDIPSICNRDLRDYINGLVEKHFNKEQVLAQFRSVGNRWNKQHIDKVDVWRFSDGKEEMVATRKPLDTSFDAKRIEAVTDTGIQRILSNYLEAKGGDPKIAFTPEGIADMNQHITAYNNGKQHKPILKVRVSTKLGKKYPVGQTGCKAGQFVVAEAGTNLYFAVYEDGEGNRSYDTIPLNEAVECLKQGLPPVPETREKGDRLKFYLSPNDLVYVPAGDEENEIDRERIYKFVDSSGTTANFIPHRTAGLIYNVDKKLAEALCNGSIIQNEYGVGSQQSKNQKALTGEMVKAVCWKLEVDRLGNILRIIK

SEQ ID NO: 611 - protein, 1380 aa, Prevotella nigrescens
MKRILGLDLGTTSIGWALVNEAESNNEASSIVRLGVRVNPLTVDEKSNFEKGKAITTNADRQLRHGARINLQRYKLRRQNLHDCLQKQGWLGTEAMYEEGKASTFETYKLRAKAAEEEISLHEFARVLFMLNKKRGYKSNRKANNKEDGQLFDGMTIAKKLYEEHLTPAEYSLQLLNKGKKFTQGYYRSDLNAELERIWDEQKKYYPEILTDEFKQQLEGKTKTNTSKIFLAKYGIYSADLKGLDRKLQPLKWRVEALKQQVDKEVLAFVISDLKGQIANTSGLLGAISDRSKELYFNKQTVGQYLWASLEENPHISIKNKPFYRQDYLDEFEKIWETQATFHKQLTPELKQEIRDIIIFYQRPLKSKKSLISVCELEQRKVKATIDGKEKEITIGPKVAPKSSPVFQEFRIWQNLNNVLLIDNDTNEKRPLDEDERYLLYKELSIKAKLSKTEALKILNKKGKQWDLNYKELEGNRTQAILFDCYNRIITLTGHEECDFKKIKASEIRHYVSTIFKNLGFSTEILDFDPSLEKHELEKQPMYQLWHLLYSYESDNSRTGNESLLRKLETTFGFPEEYATVLCDVVFEEDYGNLSVKAMRKILPYLQAGNDYSQACAYAGYNHSRHSLTKEELDQKVYKERLELLPKNSLRNPVVEKILNQMINVINAIIDEYGKPDEIRIEMARELKSSAADRKKTTHAINQGNDENQCIREILEKEFALSYISRNDIIKYKLYEELKPNGFKTLYSDTYIPKDKLFSKDFDIEHIIPKARLFDDSYSNKTLEARDINLAKSNKTAFDFVKEKYGEQGAEAYKKKLDMLLGNNVISKPKYNKLLMTEADIPSDFINRDLRNTQYIARKACEILGELVRTVTPTTGKITNRLREDWQLVDVMKELNFEKYEKLGLTEIVEDRDGRKIKRIKDWTKRNDHRHHAMDALAIAFTKPSYIQYLNNLNARSNKGDSIYAIENKELHYEEGKLRFNAPIPVNVFRAEAKRHLSAILVSIKAKNKVMTQNVNKIKTKHGIIKKIQLTPRGPLHNETIYGTKMRPIIKKVKVGAALDEATINKVSSPAIREVLLKRLNEYSGNAKKAFTGKNTLDKNPIYLNAERTKTVPASVKTVEWENYHPIRKPITPDLKVDKVIDKGIGEILKARLEEFNGDAKKAFSNLEENPIYLDQTKKIALKRVSIEGVLSTIPLHTLKNQAGKPIMGKDGKPVLGNYVQTSNNHHIAFYYDEDGNLQDNAVSFFEAAERKSQGISVIDKDYNRDKGWRFLFTMKQNEYFVFPNEATGFIPSEVDLTDEANYGIISPNLYRVQKMSRIEKGTSVSRDYWFRHHLETILNDDSRLKNSAFKRINSLKPLEGIIKVRINSIGKIVAVGEYD

SEQ ID NO: 612 - protein, 1506 aa, Prevotella nigrescens
MKTILGLDLGPNSIGWAKVEVDDEGNYLRNIKLGSRIIPMTQDMLGDFDKGVKVSQTAIRTDFRGNRRLIERHLLRRERLHRVLHALKFLPKHYEDAIGWDRNEPATYGKFVNNSEPKLAWERQEDGSMRFLFMESFNEMVADFAQNQPSLVSDGKKIPLDWTIYYLRKKALTRPIKKEELAWILLNFNQKRGYYQLRGEEEEDNLTKRKEYYKLKVVGVEADGAPKGGKTWYNIHLENGWTARCQSKIPLDDWVGKVKEYIVTTEYEDDGKTPKCDKEGKVKRSFKSPEKDDWQLIKTRTEKFIDDSNKTVGAFIYDYLLEKPFDKIRGKYIRTIERKYYKNELREILREQTKYHEGLHSLEALKICAEELYKNNQQHQEYLLKKDMTFLLLNDLIFYQRPLKSKKSLIADCPYEVYKYDDKLTGKKGQKKIKCIAKSNPYYQEFRLWQFIANLRLFSVTDGKEVTAEYLKTEEDYVRLFSFLNDRKDIKQETFLRSFLKLKKESIGSEKIYPIRWNYIEDANKSYPCNATRHELLLAFDRADIPRELLDVEEREYRLWHLLYSIEAKEETESALRKLKANKAFGDLNIDDAFVNSFLKIKPFEKEYGAYSEKAIKKLLAVMRRGSLWKEADICEATKQNIAKILQNDIDEKLKKKIEAAVSSFNKLSDFQGLPTWLACYVVYGRHSEAAQIQCWQSPEDLKTYINKFKQHSLRNPIVEQCLLETLRTVYDIWKDAGQIDEIHIELGRNMKSTAEQRARKTKDILRNENTNLRIKNLLVELKNDDKIENVRPYSPSQQEILRIYEEGALQELSKEDEMFEDISKISKMAQPSPTELSRYKLWLEQKYRSPYTGRVIPLSKLFTTAYQIEHIIPQSRYFDDSFNNKVICESEVNSLKDNMLGYEFIKECGGRIVHCTLLGDVKIFTKEEYKDFVTKHYIDNTYKRDKLLLEDIPQEFSARQLNDSRYISKMVQTVLSNIVRAENEQEATSKFVVSCNGAITNRLKKDWGLNDVWSSIVCPRFKRLNEITKTNAFGHWEDKAGKHVFQTTVPLELQRGFSKKRIDHRHHAMDALVIACASRNIVNYLNNESANSPEKREDLRKKLCDEKRKIRKPWKTFTQDAREALSDVVVSFKNYVRVINKATNYYEHYSSSGNKVMISQKGNDMWAIRKPLHKESVFGRVNLCRKVIVSLKKALENIPAICDKTLRDYINALVEKHFNTRQLLAHFKSINYRLNRQCVEKVEVWQFSDEKIEMVARRKSLDTSFDDKQISSITDTGIQKILLNYLQTKDGNAEIAFTPEGIEEMNKNISLYNDGKAHQPILKVRVATPKGMKYPVGQTGNKATKFVVAEKGTNLYFAIYENELGVRSYDTIPLNIVVERLKEGLSPVPQANEADIPLKFYLSPNDLVYVPTKENEDELCRDRIYKFVDSSGTTANFVPHTSANTIYNVDKEYAEKCCNGAVFLNEYGLGSPQSKNQRALTGEMIKEICWKLKVDRLGNIIKVIK

SEQ ID NO: 613 - protein, 774 aa, Prevotella oulorum
MEQCILETLRTVYDIWKEAGQIDEIHVELGREMKQTAEQRAHLTEKVLRNENTNLRIKSLLMELKNDADMKDVRPYSPMQQEILRIYEEGALQTLSKDDAAFTEIMKISKMAQPSASELQRYRLWLEQKYRSPYTGKPISLSKLFTSAYQIEHIIPKKRYFDDSFSNKVICEAEVNGKKDSMLAYEFIKDCGGDVIHCTTLGDVTILSEAEYKALVTELYANNKSKKDKLLMEDIPQDFINRQLNDSRYISRVVMTLLSNIVRIEGEEEATSKFVIPCSGGITDKLKKDWGLNDVWNNIVYPRFERLNALTNTSDFGQWENKEGKRVFQTSVPLELQRGYQKKRIDHRHHAMDALVIACASRKIINYLNNQEANDPTKQENARKQLCIKSRIIRKPWETFTQDAYKALDNIVVSFKNYVRVINKATNYYERYNADGKKAVDEQKGEAMWAIRKPMHKDTVFGHVNLRRKAVVKLKDALENIPAICDKTLRHYIQDLQKKHFNTKQLLAHFKSINYRLNKQAVDKVEVWQYSDDKEQLAATRKPLGPSFDAKCIAAITDTGIQKILLNYLQAKGGDPAIAFTPEGIAEMNQNIAVYNGGKQHQPILKVRIAKPMGKKFPIGQTGNKAFQYVIAEEGTNLYFAIYEDEEGNRTYDTIALREVVERLKQGLTPVPEKNEKGVALKFHLSPNDLVYVPTADELLSKVCSLDKNRIYKMVSATKSECLFIPHSVAKTIYDKVEFEALNKMGRALTGEMIKSVCWKIEVDRLGHIVNIIK

SEQ ID NO: 614 - protein, 691 aa, Prevotella oulorum
MKTILGLDLGTNSIGWAKVIVDDNENYLRDIQLGSRIIPMSQDVLGKFDKGVTESQTAIRTSFRGVRRLRERTLQRRERLHRVLHTLHYLPPHYDSAIGWDRKTPTTYGKFLNHGEPKLAWERREDGTMQFLFMDAFHEMIADFAKYQPALVADGKKVPLDWTIYYLRKKALTQPIKKEELAWILLNFNQKRGYYQLRGEEDEENAAKHEEYHELKVVGVEVDEAGKGDNTWYNVKLENGWTYHRQSKIPLDDWVGKVRAFIVTTEYEKDGTTPKKDKEGNVKRSFRSPDEKDWGLRKKQTEHSLEASGTPVGAFIYDHLLKEPSDKIRGKFIHTIERKYYKQELAAILREQSKHHEKLCSKDMLKACIEELYPNNPLHRESLLKKDMPYLLIEDLIFYQRPLKSKKSLIAECPYEAYSYVDKETGEMKRQGIKCIAKSNPYYQEFRLWQLIANLRLRNRSDERDVTAEYLPHQEDYVRLFTYLNDRKEINQETLLKDFFKLKKVTIGGEKVFPIRWDYIEDKEKKYPCNATRHELLLALDRAGIEHDWLNDRDLAYRLWHLLYSVDSKDETERALRKLKDDDAFVESFLKIKPFEKEYGAYSEKAIKKLLPVMRRGSLWNEADLCPSTKERIANILQGTIDEKLKKKIGAFISSCQQVSDFQGLPEWLACYVVYGRHSEATDIQRWETPE

SEQ ID NO: 615 - protein, 242 aa, Prevotella saccharolytica
MKLVLGLDLGVGSVGWALIFITDSGEPIKILALGERIVSMDSNNSNEFSAGATCTLNQKKTKAKSVRKGYSRYVQRRDALTAELRHIGMMPDETLIKLPVLDLWQLRANAATEGKKLSLAEIGRVLYHINQRRGYKHGKSDVSSDNKQKGYVKAVNERYCMIQERQQTIGQYFALKLKETAVTTEKGTFYTFRIKDQVFPREAYEEEFVVAYSTKVLKFKQITTLLNVVICLMMLLLIVQRY

SEQ ID NO: 616 - protein, 1174 aa, Prevotella sp.
MEFHPELCDAELLKACAEELYRNNEAHRAQLLAKDFKHLLVEDVLFYQRPLKSKKSLIANCPYETRQYINKETGEIKDVNVKCIAKSNPYFQEFRLWQWISNLRLLRQADGQDVTAAYIKGNEDKERLFDLLNNQGEIKQEHILRDFLKLKKPKGGEFPLRWNYVDDKIYPANETRHAINKAIKGMAVDKEEKETLGQLLDQPAVAYMLWNLLYSITDRNELARALRRFALTHGVSSVDAFVESFLKVKPFKKEYGAYSEKATKKLLQVMRLGKYWCGDELPEPAKRTKGNKQAVYDEMAHRGICKQTLQNISNIIEENIDERLMGALLNPERPLTELSHFQGLSVSDACYVVYGRHSEVAEIVKWKDADELNTFINNFKQHSMRNPIVEQCVLETLRTVRDVWEQEGQIDEIHVELGRNMKRTAEQRARDTQAIQRNENTNMRISLLLTELKNDPSISDVRPYSPSQRELLKIYEEGALENLTNQDEDIAKISRLAQPSASELRRYKLWLDQKYVSPYTGRPIPLAKLFTPAYEIEHIIPQSRYFDNSFSNKVICEAEVNKLKDNLLGMEFIKKFGGKTKGILDEEAYKLHVTTNYAHNPAKRSKLLMEDLPTDFNSRQLNDTRYISKTVMALLSNVVREEGERETRSKHVVVCTGGVTDTLKKDWGLHDVWHNLVYPRFIRLNNLTGSQNFGYWRYLNEENSKKGEDSKKVFQITLPPECQRGFVKKRIDHRHHAMDALVIACASANIVNYLNNQSAANPHIHENLQRLLCDRKREIRKPWPTFTQDAQAALKDLVVSFKNTVRVVNKASNTYLRYDKDGKKKRFKQEGEGLKAIRKPMHKETYYGEVNLIRKEMVPLKRALDDVNAIVDKELRASIKGLLRDGFNPQQVLANFKAKDFKFDKRDIKKVEVYVSSEKSTPMVATRKSLDTSFNAKRIADITDTGIQKILLNYLKANDNSPEQAFTPEGIAYLNEHIAEYNDGKPHQPILKVRVSEVKGAKFAVGQTGSKKDKFVEAQSGTNLYFAIYEDKEGKRHFETIALKVAAERLKDKQMPVPEINDAGLPLKFYLSPNDLVYVPTDEDRATAHPSIDKMRIYKMVSATDRQCFFLPFTVASVISNKVEFEALNKMERVLDASEYSSAYDSSHVNKVMVKNVCWKLEVDRLGNITKIVR

SEQ ID NO: 617 - protein, 992 aa, Prevotella sp.
MITRILGLDTGTNSLAWAVVDRDANGNYTLVKRGDVIFTEGVKIEKGIESSKAAERTAHKALRVHYSRRRLHKIDTLKVLVELNLCPCLSDEQLSQWKAKKTYPLTDDFMLWQRSGSAEENNPYYCRHRCLTQKLDLTDQSQRFLLGRAFYHLAQRRGFLSNRLDTSADSDESGKVKSGIAQLSVEMEKAGCEFLGEYFYQLYKQHGNTIKLRSRYTDREEHYKKEFLAICEKQELDPKWVEALQRAIYFQRPLKSQRKGVGKCTFEPKKPRCAESHPDYEAFRMLCFLNNVKIQTPNDTSLRPLNEDEREKIWPIFFRKSKPNFDFEDIAKALAGKNNYAWYKDAGEKPFKFNYRMQQGVSGCPVTAQLIDIFGSDWQTAIAETYTAVEKKNGTKTIDEMADDVWNVLYSFSSKDKLKAFATEKLQLDEASATKFANAKLPHGFASLSLKAIRNILPFLRQGFIYAHAVHLAKIPDIVTKAVWNDADKREMILSGLMEIIENYNPKDRGVEGTIDFCIKSHLQDVIDLRPGAADALYHPSMIETYPDAKLNKMGVFQLGSPRTNAIRNPMAMRSLHILRSVVNQLLRDGIIDRDTEVHVEYARELNDANKRKAIADYQREQEKKRKQYRDDIIALYKSECHKEIEPTDTDILKFQLWEEQNHLCLYTGTQIGICDFLGDNPKFDIEHTVPRSVGGDSTQMNLTLCDATFNRQVKGAQLPSQLSNHADILVRIDHWKSKCEDLRKQLDKIRTYGGMEKNMKDRLIQKRHRLKMDLDYWQGKYSRFTMTEVPEGFSRRQGAGIGLVSKYAGLFLKSLFHNEQNPNKSNVYVVKGVTTAEFRRMWGLQGEYEKKSRLNHCHHCIDAITIACIGKAEYDKMAQYYHDEELFQWRGTTTKPHFNKPWPTFTEDVLAIEQSLLVKHLTKDNMPKQAKKRVRTATGKYLAQGDTARGSLHKDTYYGAIEQNGEIRYVLRKPLNKFENEAELEKIVDQA

SEQ ID NO: 618 - protein, 1375 aa, Prevotella sp.
MKKILGLDLGTTSIGWALVNESENKDEQSSIVRLGVRVIPLTVDEKGNFEKGKAITTNADRQQVHAARINLQRYKLRRENLRDCLQKQGWIGSEPMCEDGKSSTFETYKLRAKAAVEEVSLHEFARVLFMLNKKRGYKSNRKANDKEEGKLFDGMTIAKKLYEEHLTPAEYSLQLLNTGRKFTPEYYRSDLIEEFEKIWNEQQKYYPEILTDEFKQQLEGKAKSNTSKLFLGKYGIYSADTKGLDRRLQPLKWRVEAMKQQVDKDVLAFVISDLKGQIANTSGLLGAISDRSKELYFSKQTIGQYLWASLQENPHISIKNQPFYRQDYLDEFEKIWETQATYHKELTSELKQEIRDIIIFYQRPLKSKKNLIAVCELEQRKVKVTVDGKEKEITIGPKIAPKSSPMFQEFRIWQNLNNILLLDHETNSKRPLYEEERNLLYEELSVKEKLSKTEALKVLGKKSKQWDLNYKELEGNRTQAVLYDCYNRIIVMSGHEECNFKKLKASDIRHYVKMIFKNLAFNTDILCFDSSLKGHELERQPMCQLWHLLYSYEGDNSRTGNDALLRKLETSFGFPKEYAAVLADVIFEDSYGNLSVKAMRNILPHLQAGKDYSQACEEAGYKHSRRSLTKEELNQKVYKEKLELLPKNSLHNPVVEKILNQMVNVINAVIEEYGKPDEIRIELARDLKIGAAERENMTRSINQGNAENKRIREILEKEFALSYLSRNDIIKYKLYEELKSNGFKTLYSDTYISKDKLFSKDFDIEHIIPKARLFDDSLSNKTIEARDVNIAKSNKTAFDFILERYGEQGVKTYKTKLLRLLEDGAISNKKYNNLLKTEADIPSGFIDRDLRNTQYIAKKAYEILSELVKIVTPTTGSVTNRLREDWQLVDVMKELNFEKYQKLGLADVIEDRDGRKVKRIKDWTKRNDHRHHAMDALTIAFTKPSYIQYLNNLNARSDKSSSIYGIEVKELHREEGKFRFNAPLPINEFRAEAKRHLKSVLVSIKAKKKVMTQNVNKIKTKHGIIKKVQLTPRGELHNATYYGTKKRPLVRMVKVGAALDEATIKRVCSPAIRAALLKRLNAYNGDAKEAFTGRNSIDKNPIYLDIEQTKLVPVLVKTIEWGMYHPIRKRITPDLKIDKVIDKGIREKLKARLAEFNGDAQKAFSNLDENPIYMDEAKRITLKRVSIEGVLSAIPLHTLKDKAGKPVIGSDGKPVFGDYVQTSNNHHIAFYIDDKGNLQDNPVSFFEAAERKSQGVPVIDRRYNCDKGWHFVFTMKQNEYFVFPNEATGFIPSEVDLLDEANYCIISPNLYRVQKLSKASGRDYWFRHHLETMLNDDLRLKNSTFKRIQSLKGLEDIVKVRINSIGKIVAVGKYD

SEQ ID NO: 619 - protein, 1483 aa, Prevotella sp.
MKTILGLDLGTNSIGWAKVSVDDYGNYLHDIKLGSRIIPMSQDVLGNFDSGVTVSQTAQRTEFRSKRRLVQRNLQRRERLHRVLHVLDFLPAHYDAAIGWDRTEAVTYGKFLNHAEPKLAWEELGNGKRRFLFMDSFHEMVADFARCQPALVADGKKIPLDWTIYYLRKKALTQAITKEELAWILLNFNQKRGYYQLRGEEEEENPTKQEEYYELKVVSVEATDSRKGNDTWYNVHLENGWIYRRSSKISLDDWVGKVKQFIVTTEYEKDGTTLKTDKEGNVKRSFRAPNENDWGLRKKRTETLLEMSGKTVGAFIYDHLLQEPADKIRGNFIRTIERHYYKAELEAILAEQCKYHIELRDKEMLEACARELYLNNLPHQRSLMKKDMTYLLLYDLIFYQRPLKSKKALIANCPYEYYEYVDKETGEIKRQNIKCIAKSNPYFQEFRLWQFVLNLRLFDRVEDKEVTANYLPTADDHARLFTYLNDRKEINQETLLKDYFKLKKVKIGNEKEYPIRWNYIEDKEKKYPCNETRYELLMALDRAGIEHKWLDDNNLEYRLWHLLYSVEVKSESETALRKLKNDDAFVNSFLKVKPFKKEYGAYSEKAIKRLLAVMRKGFLWNEQDICDETRKRIEIIIKGDVDEKVKERMGHAAYSFDRVSDFQGLPEWLACYVVYGRHSEAMDIQRWDSPERLMAYINNFKQYSLRNPIVEQCILETLRTVHDIWKETGQIDEIHVELGREMKSTSEERARRTQNVLRNENTNLRIKSLLIELKNDTDICNVHPYSPMQQEILRIYEEGALQELNREDEDFEEISKISQMSQPSGKELNRYKLWLEQKYRSPYTGKAISLAKLFTPAYQIEHVIPQSRYFDDSFTNKVICEAEVNTLKSNLLGYEFIKKHGGEIIHCTTLGDVRIFSESEYKAFVMDHYANNKSKKDKLLMEDIPQEFLSRQMNDSRYISKVVKTLLSNIVRMADESEATSKSVIVCTGGVTDRLKKDWGLNDVWNSIVYSRFERLNRLTGTEAFGHWENKDGKRVFQTSMPLELQRGFRKKRIDHRHHAMDALVIACASRNIVNYLNNESANNPKKREDLRRQLCDKNRVIRKPWETFTQDAYNALENVVVSFKNYVRVINKATNRYEHYDENGKKRFVQQKGSELWAIRKPMHKETYYGHVNLRRKELVTLQKALDDIPSICDKKLRDYISALVEKHFNKRQLLAHFKSTDYYWQKQYVNKVYVWTFSDDIKPLVATRKLLDTSFDAKRIGTITDTGIQKILRNYLEAKGGNATLAFTPEGIVEMNQNISKYNDGKPHQPILKVRITEPMGAKYRVGQTENKMAKYVEAQSGTNLYFAIYEDSEGKRSYTTVPLDEVAERLKQRLSPVPEKDENDVPLKFYLSPNDLVYVPTEEELQLRECKLNKDRIYKMVSSTGSECHFIPYYVANVIYNKVEFEAKNKIGRALTGEMIKAVCWKLEIDRLGNILKVIK

SEQ ID NO: 620 - protein, 593 aa, Prevotella sp.
MNTRILGLDTGTNSLAWAVVDRDAKGNYTLVRRGDVIFTEGVNVDGQPVPSKAAVKSKYKSLRVQYARRRLRKIDTLKVLVSLDLCPYLSDQQLSQWKAKKTYPLTDDFMLWQRSGSAEENNPYYCRYRCLTQKLDLTDQSQRFLLGRAFYHLAQRRGFLSNRLDTTSDSAESGKVKSGIAQLSVEMEKAGCTFLGEYFYQLYKQHGNTVRLRSRYTDREEHYIKEFLAICEKQELDAQWVEKLQRALYFQRPLKSQRKGVGKCTFEPKKPRCAESHPDYEAFRMLCILNNIKIKTPKDVSLRPLNAEEREKVWPLFFRKSKPNFDFEDIAKALAGKNNYAWYKDAGEKPFRFNYRMHQGVSGCPVTAQLIDIFGSDWKAGIAETYTAVGKKNGTKTIDEMADDVWNVLYSFSSKDKLKAFATDKLQLDEARATKFANAKLPHGFAALSLKAIRNILPFLRQGFIYAHAVLLAKIPDIVTAAVWDDADKREQILSGLLEVIENYNPDDRGIEGTIDFCIKSHLQDVVDLRPGAADALYHPSMIEAYPDAKLNKMGVFQLGSPRTNAIRNPMAMRSLHILRSVVNLLLRDGMLS

SEQ ID NO: 621 - protein, 1424 aa, Prevotella sp.
MTQKVLGLDLGTNSIGSAVRNLDLSDDLQWQLEFFSSDIFRSSVNKESNGREYSLAAQRSAHRRSRGLNEVRRRRLWATLNLLIKHGFCPMSSESLMRWCTYDKRKGLFREYPIDDKDFNAWILLDFNGDGRPDYSSPYQLRRELVTRQFDFEQPIERYKLGRALYHIAQHRGFKSSKGETLSQQETNSKPSSTDEIPDVAGAMKASEEKLSKGLSTYMKEHNLLTVGAAFAQLEDEGVRVRNNNDYRAIRSQFQHEIETIFKFQQGLSVESELYERLISEKKNVGTIFYKRPLRSQRGNVGKCTLERSKPRCAIGHPLFEKFRAWTLINNIKVRMSVDTLDEQLPMKLRLDLYNECFLAFVRTEFKFEDIRKYLEKRLGIHFSYNDKTINYKDSTSVAGCPITARFRKMLGEEWESFRVEGQKERQAHSKNNISFHRVSYSIEDIWHFCYDAEEPEAVLAFAQETLRLERKKAEELVRIWSAMPQGYAMLSQKAIRNINKILMLGLKYSDAVILAKVPELVDVSDEELLSIAKDYYLVEAQVNYDKRINSIVNGLIAKYKSVSEEYRFADHNYEYLLDESDEKDIIRQIENSLGARRWSLMDANEQTDILQKVRDRYQDFFRSHERKFVESPKLGESFENYLTKKFPMVEREQWKKLYHPSQITIYRPVSVGKDRSVLRLGNPDIGAIKNPTVLRVLNTLRRRVNQLLDDGVISPDETRVVVETARELNDANRKWALDTYNRIRHDENEKIKKILEEFYPKRDGISTDDIDKARYVIDQREVDYFTGSKTYNKDIKKYKFWLEQGGQCMYTGRTINLSNLFDPNAFDIEHTIPESLSFDSSDMNLTLCDAHYNRFIKKNHIPTDMPNYDKAITIDGKEYPAITSQLQRWVERVERLNRNVEYWKGQARRAQNKDRKDQCMREMHLWKMELEYWKKKLERFTVTEVTDGFKNSQLVDTRVITRHAVLYLKSIFPHVDVQRGDVTAKFRKILGIQSVDEKKDRSLHSHHAIDATTLTIIPVSAKRDRMLELFAKIEEINKMLSFSGSEDRTGLIQELEGLKNKLQMEVKVCRIGHNVSEIGTFINDNIIVNHHIKNQALTPVRRRLRKKGYIVGGVDNPRWQTGDALRGEIHKASYYGAITQFAKDDEGKVLMKEGRPQVNPTIKFVIRRELKYKKSAADSGFASWDDLGKAIVDKELFALMKGQFPAETSFKDACEQGIYMIKKGKNGMPDIKLHHIRHVRCEAPQSGLKIKEQTYKSEKEYKRYFYAAVGDLYAMCCYTNGKIREFRIYSLYDVSCHRKSDIEDIPEFITDKKGNRLMLDYKLRTGDMILLYKDNPAELYDLDNVNLSRRLYKINRFESQSNLVLMTHHLSTSKERGRSLGKTVDYQNLPESIRSSVKSLNFLIMGENRDFVIKNGKIIFNHR

SEQ ID NO: 622 - protein, 241 aa, Prevotella sp.
QAVKEKIKEAIAGKNFKTAIAEPIFMNKEKGIRINKVRYYVKAQERLKIRQQRDLSSKEYKQFFCVENESNYLLAIYEGELKGKKERDFCVVNNLDSAACLKRSNKGKAAPLVPERSEERNLPLLAVLKRGTQVLFYENSPEEILFDNPQDLVRRLYKVTGINTKKDVKNGKTYLYGNIELRFHQNAQKKDDVKMQSGVYKNNEVLRQGIVLSHKQFKALVEGVDFEFNVLGEIKKKERHA

SEQ ID NO: 623 - protein, 1216 aa, Prevotella stercorea
MTKILGIDTGTNSLGWAIVDKTADNYNLLDKGVNIFQEGVKIEKGIESSKAAERTEHRATRVRYYRIKLRKIRLLRILSDNHLCPPLSQEELSTWRLKKVYPKNELFMQWQRTDDDTEKTPYAYRHKCIHEKLDLSDVTDRYILGRAFYHIIQRRGFLSNRKEQGGEDSGKVKEGISTLTHEMNEAGYEYLGDYFYALYNKGEKIRKHYTARNEHFLSEFKAICEKQDLEKELGSEVVRNIEKAIFDQRPLKSQKGQVGKCVFEKNKTKCPSSHPMYEEFRMLTFINNIKIKTPNDDVLRPLNTGEREKIMPLFFRKSKKQFDFEDITKKLAPKKMYGFYKKEEDAEMPFLFNYPMDTSVSGCPVTAALKDVFGDDWITAICETYTLGEGKSRFDIVNDIWHALYFYSDKDKLAEFAINRLQLSEDEAKIFSEISLPADYASLSLKAICKILPYLRRGLIYSHAVFLGNLCEVMPKYEWSIKEMRETIIDNIIMEMDKCDTKDKRTFEVCIKDYLKGQYNVSDNSLKKLYHPSMIETYPRVQYTNEHGVYQLGSPRIDSVRNPMAMRSMFRLRKLVNRLLVEGKIDQNTEVHIEFARELNDANKRNAIALFVKENQSANDEARKQIITLFKKETGTDIEPTDKDILKYVLWEEQNHICLYTGKQIRISDFIGANPKFDIEHTIPRSVGGDSTKMNLTLCDSRFNREVKKTKLPVELPNHDEIMERIKEWKKNYELLDIQIRKNKKLSKGATTKEQKDTIIRKRHLLELRRDYWRGKYERFTMESVPEGFSRRQGTDISVISKYARLYLKSLFNRVYTVKGIATSDFRKIWGIQDIYSKKERINHVHHCIDAIVIACIGLDEYNKLGAYYHDEENNKWYGMSKASFKKPWATFVEDIKKIQDEILVYHYTPDNMPKQGRRRIKIDGKKILCKGDAARGSLHNDTYYGAIENDGAVKYVKRIDLASLEEKDVKNIVDDTVRSIIEAAIKEKGFKDAMASTIWMNEEKRVPIKKVRCFTPSITKPLNIRKQRDVSIKEYKQQYHVANDSNYLLALYIGTDNKGKEKREFEIVNILQAAQYYRTSNDKEVVDRHIVPIKSEHDYPFAYTLKIGTMVLLYEKSPNEVWDATIKERNRRLYKVTGLSTMRMKGRNGEYAYATVKLIHNEEARPSKDIKAKNGEYEQGEEFRPAIIMLHTQLNALVQGYDFEINELGEIRRLR

SEQ ID NO: 624 - protein, 1487 aa, Prevotella timonensis; identical to SEQ ID NO: 135

SEQ ID NO: 625 - protein, 770 aa, Pseudoramibacter alactolyticus
MAKGYFASDEEIDFSGVDDGFKNTLSSHQKFKEIFDVEVLNDWQKSMSEKIIFWATVYGDSKKFLKERLEDAYGNELDQKQIKRILGLRFKDWGRLSEAFLNLEGKNSKTNQSQTIIEALWNGDGTNNFNLMELLSSQFTYRDTLKKRALKGEKTLTNITYEDLSDLYLSPSVRRMVWQTILIVKELRQVLGAGPAKIFIEMARDVTLKAGTRTTSRRQQLLDLYKNVQTESRNWVEEIETQEESRFRSKKIFLYYTQMGQCMYTGEPIVFKDLFNRNLYDIDHIYPRHFVKDDSLINNLVLVKKQANSHKSDTFPIENSIQQARRDFWKWLSEKGLISREKFNRLTRRTSFSDEELAGFISRQIVETRQGTKAVAQIFENALPDSEVVYVKAGNVSDFRHHFNLLKCREINDLHHAQDAYLNVVVGNVYHTKFTKNPINFIKGYRKDRKAYAYHMDQIFDHPVKRNDIIAWQTDKNQSIATVKKVMAKGTPLVTRMSYEEHGELSNQNICSAKAAQKAEGKGYLPIKNSERLSNTQRYGGYNKYAGSYFFLVEHTLKKNRVRTIETMPLFLRDTIKTSKDLLKYCCESLKLEAPSIRVMKIKMGSLLSVNGAFVYLTGRSGKKLITPNGFQLILPQKWQDYIRLLIKTKDSPDDVEGISGGKNIEFYDILVEKHTKTCLKNRPNPIGEKLREWRNDFIALDNQKQSDILLEILKLTTFDNSGADLRAIGGKNQSGVSTIGKKISSQKSVVLVHRSVTGIFEKQVDLLSI

SEQ ID NO: 626 - protein, 103 aa, Rhizobium etli
MSGEQLTREIGRSGVKASAVGLGTWAIGGWMWGGTDEAQSIAAIQASLDAGVTLIDTAPAYGLGRSEEIVGKALAGRRDKAVIATKCGLVWHTQKGNHFFDQD

SEQ ID NO: 627 - protein, 1059 aa, Rhodovulum sp.
MGIRFAFDLGTNSIGWAVWRTGPGVFGEDTAASLDGSGVLIFKDGRNPKDGQSLATMRRVPRQSRKRRDRFVLRRRDLLAALRKAGLFPVDVEEGRRLAATDPYHLRAKALDESLTPHEMGRVIFHLNQRRGFRSNRKADRQDREKGKIAEGSKRLAETLAATNCRTLGEFLWSRHRGTPRTRSPTRIRMEGEGAKALYAFYPTREMVRAEFERLWTAQSRFAPDLLTPERHEEIAGILFRQRDLAPPKIGCCTFEPSERRLPRALPSVEARGIYERLAHLRITTGPVSDRGLTRPERDVLASALLAGKSLTFKAVRKTLKILPHALVNFEEAGEKGLDGALTAKLLSKPDHYGAAWHGLSFAEKDTFVGKLLDEADEERLIRRLVTENRLSEDAARRCASIPLADGYGRLGRTANTEILAALVEETDETGTVVTYAEAVRRAGERTGRNWHHSDERDGVILDRLPYYGEILQRHVVPGSGEPEEKNEAARWGRLANPTVHIGLNQLRKVVNRLIAAHGRPDQIVVELARELKLNREQKERLDRENRKNREENERRTAILAEHGQRDTAENKIRLRLFEEQARANAGIALCPYTGRAIGIAELFTSEVEIDHILPVSLTLDDSLANRVLCRREANREKRRQTPFQAFGATPAWNDIVARAAKLPPNKRWRFDPAALERFEREGGFLGRQLNETKYLSRLAKIYLGKICDPDRVYVTPGTLTGLLRARWGLNSILSDSNFKNRSDHRHHAVDAVVIGVLTRGMIQRIAHDAARAEDQDLDRVFRDVPVPFEDFRDHVRERVSTITVAVKPEHGKGGALHEDTSYGLVPDTDPNAALGNLVVRKPIRSLTAGEVDRVRDRALRARLGALAAPFRDESGRVRDAKGLAQALEAFGAENGIRRVRILKPDASVVTIADRRTGVPYRAVAPGENHHVDIVQMRDGSWRGFAASVFEVNRPGWRPEWEVKKLGGKLVMRLHKGDMVELSDKDGQRRVKVVQQIEISANRVRLSPHNDGGKLQDRHADADDPFRWDLATIPLLKDRGCVAVRVDPIGVVTLRRSNV

SEQ ID NO: 628 - protein, 1405 aa, Riemerella anatipestifer
MKTILGLDLGTNSIGWALVKEAENSNEKSEIIKLGVRVNPLTVDEKTNFEAGRPLSTNADRTAKRSARRNLQRYKLRRKNLIDLLIKNQLIDKDTPLTEIGKNTTHQTLELRAKAARERIELEDLARVFLAINKKRGYRSSRKVNNEEEGQAVDGMAVAKKLYDENLTPGQYAYELLSKGKKYVPDFYRSDLQAEFNAIWEYQKQFYADILDDELYNALKGQGQQNSRKRFLAIKGVYTAENKGKRDDVKLRHYKWRSEAISKKINIEEVAYVLVEINNDLNKSSGYLGAISDRSKELYFNKETVGENLWKQIQKNPHTSLKNQVFYRQDYLDEFEQIWETQAQFHPQLTLALKEQIRDVIIFYQRKLKSQKGLLSFCQFESWEIERKDENGNVILNKTTQLPKRQTVGRRVAPKSSPLFQEFKIWQNINNLEVTKISEGASKNKKETETLSDDERKLLFEELNLRGNLSQKEVLQILGLKDKEYKTNFSEGLEGNRTNAALFNIYQQIAENEGYGFDWSKKSAQEIKEELKAVFPQIGIQADILDFNANLDGKEFENQASYQLWHLLYSAEEDDKINEEDQIIYGNSAVSLKKKLCEKFGFTPEYAKWIANVSLQDDYGNLSTKAMRKIIPYLIDGNDYSEACALAGYNHSNSLTKEENDNRELLDKLELLPKNSLRNPVVEKILNQMVNVVNQVIETYGKPDEVRIELARELKKSAEKRAEMTKSINEATRRNEDIKKLITKDFGIPNPTKSDVVRYRLWEELAPLAYKDVFTGKQIKKEDLFSSKIDIEHIIPKALLFDDSFSNKTLVFRETNLKKADRTAYDFIESDYNATLDDYIQRVETLYNNTKGTISKGKRNKLLMAQKNLPDGFIERDLRNSQYIAKKAKAMLYQVFKDVNVTSGSITDRLREDWDLINVMKELNFPKYKALGLTEIEERYDIGQEKTKRVEVITDWTKRNDHRHHAMNALTVAFTTSSHIQYLNYLNARKNESHKEHKNIKGIENKITHKQKDKRKFIPPMPNFREEAKKHIETILVSIKNKNKVYTKNINKTKKKSGHNTKEQLTPRGQLHKETVYGKSKRPMSKPTKINKNFSLEQAQLIINVQEKELVLRHLAQFDNNPAVAFDTKTLKKMPLLKNGEPLKEVLCFEEIFTIRKDITPDLKIEKVVDEKIKAILEQRKKDFGGNAKEAFSDLDKNPIWLNKKKGICIKRVTITGVSNAEALHHQKDHLGREILDDNGNPIPADFVSTGNNHHLAVYLDSEGKLQDNIVSFYEAVVRTSQGLPVVDKGLNKDLGWKFLFSLKQNEMFVFPNDDFDINDFDLLDDKKAELISKHLYRVQKISKVSAGNSFVRDIVFRHHLETTVKEVKELKDISYIQLKSLEGLRNIKKVRINHIGKIVQVGEY

SEQ ID NO: 629 - protein, 1145 aa, Riemerella anatipestifer
MKTILGLDLGTNSIGWALVKETENSNEKSEIIKLGVRVNPLTVDEKTNFEAGRPLSTNADRTAKRSARRNLQRYKLRRKNLIDLLIKHRLIDKDTPLTEIGKNTTHQTLELRAKAARERIELEDLARVFLAINKKRGYRSSRKVNNEEEGQVVDGMAVAKKLYDENLTPGQYAYELLSKGKKYVPDFYRSDLQAEFDSIWEYQKQFYADILDDELYNALKGQGQQNSRKRFLAIKGVYTAENKGKRDEVKLQHYKWRSEAITQKLSIEEVAYVLVEINNDLNKSSGYLGAISDRSKELYFNKETVGENLWKQIQKNPHTSLKNQVFYRQDYLDEFEQIWETQAQFHPQLTLALKEQIRDVVIFYQRKLKSQKGLLSFCQFESWEIERKDENGNVILNKTTQLPKRQTVGRRVAPKSSPLFQEFKIWQNINNLEIAKISDGNSKNKKETEALSDDERKLLFEELNLRGNLSQKEVLQILGLKDKEYKTNFPEGLEGNRTNAALFNIYQQIAENEGYGDWTKKSAQEIKEELKAVFPQIGIQADILDFNAELDGKEFENQASYQLWHLLYSAEEDDKINEEDQIIYGNSAVSLKKKLCEKFGFTPEYAKWIANVSLQDDYGNLSTKAMRKIIPYLIDGNDYSEACALAGYNHSNSLTKEENDNRERLNKLELLPKNSLRNPVVEKILNQMVNVVNQVIETYGKPDEVRIELARELKKSAEERAEMTKGINEATRRNEDIKKLITKNFGIPNPTKNDVVRYRLWEELAPLAYKDVFTGRQIKKEDLFSSKIDIEHIIPKALLFDDSFSNKTLAFRETNLKKADRTAYGFIESDYNATLDDYIQRVETLYNNAKGTISKGKRNKLLMAQKNLPDGFIERDLRNSQYIAKKAKSMIEKVFNDVNVTSGSITDRLREDWDLINVMKELNFPKYKALGLTEIEERYDIGQEKTKKVEVITDWTKRNDHRHHAMDALTVAFTTKSHVQYLNNLNTIHSLKGDEVDLELSKLYGLKNTITEVVNKKRKFIPPMPNFREEAKKHIETILVSIKNKNKVYTKNINKTKKESGYHTKEQLTPRGQLHKETVYGKSKRPMNKPTKINKNFSLEQAQLIINVQEKELVLRHLAQFDNNPAVAFDTKTLKKCHYLKMVNL

SEQ ID NO: 630 - protein, 1400 aa, Riemerella anatipestifer
MKTILGLDLGTNSIGWALVKETENSNEKSEIIKLGVRVNPLTVDEKTNFEAGRPLSTNADRTAKRSARRNLQRYKLRRKNLIDLLIKHRLIDKDTPLTEIGKNTTHQTLELRAKAARERIELEDLARVFLAINKKRGYRSSRKVNNEEEGQVVDGMAVAKKLYDENLTPGQYAYELLSKGKKYVPDFYRSDLQAEFDSIWEYQKQFYADILDDELYNALKGQGQQNSRKRFLAIKGVYTAENKGKRDEVKLQHYKWRSEAITQKLSIEEVAYVLVEINNDLNKSSGYLGAISDRSKELYFNKETVGENLWKQIQKNPHTSLKNQVFYRQDYLDEFEQIWETQAQFHPQLTLALKEQIRDVVIFYQRKLKSQKGLLSFCQFESWEIERKDENGNVILNKTTQLPKRQTVGRRVAPKSSPLFQEFKIWQNINNLEIAKISDGNSKNKKETEALSDDERKLLFEELNLRGNLSQKEVLQILGLKDKEYKTNFPEGLEGNRTNAALFNIYQQIAENEGYGDWTKKSAQEIKEELKAVFPQIGIQADILDFNAELDGKEFENQASYQLWHLLYSAEEDDKINEEDQIIYGNSAVSLKKKLCEKFGFTPEYAKWIANVSLQDDYGNLSTKAMRKIIPYLIDGNDYSEACALAGYNHSNSLTKEENDNRERLNKLELLPKNSLRNPVVEKILNQMVNVVNQVIETYGKPDEVRIELARELKKSAEERAEMTKGINEATRRNEDIKKLITKNFGIPNPTKNDVVRYRLWEELAPLAYKDVFTGRQIKKEDLFSSKIDIEHIIPKALLFDDSFSNKTLAFRETNLKKADRTAYGFIESDYNATLDDYIQRVETLYNNAKGTISKGKRNKLLMAQKNLPDGFIERDLRNSQYIAKKAKSMIEKVFNDVNVTSGSITDRLREDWDLINVMKELNFPKYKALGLTEIEERYDIGQEKTKKVEVITDWTKRNDHRHHAMDALTVAFTTKSHVQYLNNLNTIHSLKGDEVDLELSKLYGLKNTITEVVNKKRKFIPPMPNFREEAKKHIETILVSIKNKNKVYTKNINKTKKESGYHTKEQLTPRGQLHKETVYGKSKRPMNKPTKINKNFSLEQAQLIINVQEKELVLRHLAQFDNNPAVAFDTKTLKKMPLLKNGEPLKEVLCFEEIFTIRKDITPDLKIEKVVDEKIKAILEQRKKDFGGNAKEAFSDLDKNPIWLNKEKGICIKRVTITGVSNAEALHHQKDHLGREILDDNGNPIPADFVSTGNNHHVAIYEDEKGKLQEKVVSLYEAVARANQGLPVVDKGLNEDLGWKFLFTMKQNEMFVFPNDDFDVNDIDLLDENNAKIISQHLFRVQKLATKNYMFRHHLETNVQEVKELNDIAYKSIRSTEPLKNIKKVRINHIGKIVQVGEY

SEQ ID NO: 631 - protein, 1128 aa, Roseburia intestinalis
MDEKMDYRIGLDIGIASVGWAVLQNNSDDEPVRIVDLGVRIFDTAEIPKTGESLAGPRRAARTTRRRLRRRKHRLDRIKWLFENQGLINIDDFLKRYNMAGLPDVYQLRYEALDRKLTDEELAQVLLHIAKHRGFRSTRKAETAAKENGAVLKATDENQKRMQEKGYRTVGEMIYLDEAFRIGCSWSEKGYILTPRNKAENYQHTMLRAMLVEEVKEIFSSQRRLGNKKATEELEEKYLEIMTSQRSFDLGPGMQPDGKPSPYAMEGFSDRVGKCTFLGDQGELRGAKGTYTAEYFVALQKINHTKLVNQDGETRNFTEEERRALTLLLFTQKEVKYAAVRKKLGLPEDILFYNLNYKKAATKEEQQKENQNTEKAKFIGMPYYHDYKKCLEERVKYLTENEVRDLFDEIGMILTCYKNDDSRTERLAKLGLVPIEMEGLLAYTPTKFQHLSMKAMRNIIPFLEKGMTYDKACEEAGYDFKADSKGTKQKLLTGENVNQTINEITNPVVKRSVSQTVKVINAIIRTYGSPQAINIELAREMSKTFEERRKIKGDMEKRQKNNEDVKKQIQELGKLSPTGQDILKYRLWQEQQGICMYSGKTIPLEELFKPGYDIDHILPYSITFDDSFRNKVLVTSQENRQKGNRTPYEYMGNDEQRWNEFETRVKTTIRDYKKQQKLLKKHFSEEERSEFKERNLTDTKYITTVIYNMIRQNLEMAPLNRPEKKKQVRAVNGAITAYLRKRWGLPQKNRETDTHHAMDAVVIACCTDGMIQKISRYTKVRERCYSKGTEFVDAETGEIFRPEDYSRAEWDEIFGVHIPKPWETFRAELDVRMGDDPKGFLDTHSDVALELDYPEYIYENLRPIFVSRMPNHKVTGAAHADTIRSPRHFKDEGIVLTKTALTDLKLDKDGEIDGYYNPQSDLLLYEALKKQLLLYGNDAKKAFAQDFHKPKADGTEGPVVRKVKIQKKQTMGVFVDSGNGIAENGGMVRIDVFRVNGKYYFVPVYTADVVKKVLPNRASTANKPYSEWRTMEDKDFLFSLYSRDLVHIKSKKGIPIKNVDGSLGESKEVYAYYIGADISGAKIEGKAHDSRYTFRGIGVQKLELIEKCQVDILGHISTVKNEKRMGFS

SEQ ID NO: 632 - protein, 1471 aa, Scardovia wiggsiae
MGYKAPRNDKGEIDYGVGLDLGNGSVGWVAMDKDYHLIRARGHELIGARLFDPANSAENRRESRTTRRRLSRRRWRLRMLDSLFASELAKIDPNFLARRKYSWVHPKDEQNHENWYGSIIFGSKEQDKQFYKDYPTIYHLRKKLTEDTERHDIREIYVAIHHIVKYRGHFLREGEINSENLFDPEGFVELIKDVIKLNNSYDESTPIFEASPADVSEALLNEHTSRSGRIEDTLDKLDFSVSRVDKHELKGMRDAAKAVIGAIVGNTADFSKIFNLDNLDKDSKDNLKLKFADSNFDEKYGGVVGSGLLDETQIELVDRIHAVYDAVALKGILGDAHTISEAKVESYEKHRKNWKLIKEELRTKENKDEVDLWYGDLSGRQYKNPPDPEKGPDEGSKKDSPIRDSDQKQNLIKKANDYFTELIDDSQLSEEQKNCLKNDINNGQLFPVQRSSDNGVIPYQIHLNELRRIIENQKQYYPFLAETFIRKTAEGKSYEENKIVALLKFRVPYYVGPLVSKEDMEEHSSGNSAYHWMARNPGRGEAITPWNFDEVVDKDESGARFISRLTGTDTYLLGEPTLPQHSLLYEEYMVLSELNNVRLNVRQGNHWSDKNRQRLSYKQKEFLIENLFKEHKTVTRKRAEDCLSSMGCGEVQLFGLSDEKKFASSLSSYITLKKILGKAFVDDSGNSAILERIIEVQTVFEDREPLTHQLSLIDSLTVEQRKQLAKIHYTGWGKLSRKLLTSKKGSYKIHSQNEIMRTQHSIIDIMRGDSLNLIEIIRDKKIGIGEWIDNENLDRETGESDVSRLESVFEGIVMSPRVKRGVVQAVRVIDDLAKAIGNPPQRIFIEMADEVQASQRTVSRLSRLKALYGSPSLQKEFNDLKDLRKSLNETKDADLQEDRLYLYYIQLGKDLYTGKEISIDSLSSAYDIDHIVPQALTQDDSIDNRVLVSRKENARKTDSYLYTPDLIKNMRPLWGKLLAAGLMSQKKYDALTRVDDFKDREKQRFVQRSLVETRQIMKNVSTILRTYYGEDTNVVTLKSSITHDMRKYLGFPYKNRDINDYHHAQDALCISAAGQFMLNRHFVSGGEVTDGASNAYNMYLAEYLQEFRDAKARGERKRSTAFGFVVGSMSSKDDEKRTDHRTGEIVWSETNAEYLRKVMNYKKMLITQKVGDVKTRALYDETRYGHKESSAKSIKFDNLRRDTSLYGGFSGASTAYMMLVEYKKKNKLVSITAQEASLLAVADQKNDTVSVMDGILASHGLSGAKILLPKIVTGQLLDYSDALVTLQSASELNTARQMWLPRNDYNDIDIILKSKDIEDAAHKLGYDSDTVHVLRRIQKLFEAVFRVAESQFPLHQLSKDQQEEILRDPQNYGFGSAVKLLGGLLKALHANAENTNLAGLVKVLHGDKEYSDDGKAKEFKKFGFSPRWRRISNPTGFTLSDSDTFIYQSPSGIFEQRVTVKELKEKADKQK

SEQ ID NO: 633 - protein, 116 aa, Sphingobacterium spiritivorum
MFRKYFEEKNSARLLFTLKQGDFVYVPDDNEEVILDESSPLFIDYWKNISERSNNIHVVQKFSGKEIYFLKHTIADTIAKKIEFGSQDCYQSLNGKSIKEFCIKIDSDRLGNISKV

SEQ ID NO: 634 - protein, 1306 aa, Sphingobacterium spiritivorum; identical to SEQ ID NO: 98

SEQ ID NO: 635 - protein, 1110 aa, Sphingobium sp.
MAEGKKRIWRLGADLGANSLGWAAIELSAPVNGKPIAILAAGSRIFSDGRDPKSGASLAVDRRDARAMRRRRDRFKQRQKALIKYLIADGLFPADEAARNAMAAIDPYAVRARALDEALSLPELGRALFHLNQRRGFKSNRKADRKADDDAGKIAIGIDRTRDAIAEDEADAGAEPGSWTFGKWLHERRLKGQSVRTRLRPESGEDAKGDGYDFYPDRALMEEEFDAIWAAQAPHHPDVLTNDVHDRLHEIIFYQRPLKAPQVGMCSLIPGDRRLPKAHPLFQRRRLLEELNALMIVRPGEVAQRLTREERDILLLKLKDKNKVSFATLRKALKLDPDARFNKESEDRTDLKGDEVAAVMGSKTRFGNLWVHLSIEAQWDVLARLDAVESDAEDAAFCAWLVETYALTPEQARAVANAPLPPGYGRFGETATRKLIEALRDGKKDDRVLVYSEAVTEAGLGHHSDRRTGEVFEDAKGRPQLPYYGVALERHIMPGTGDPSDPEEMRVGRLTNPTVHIGLNQLRRILNVLIRAYGPPAEIAIELARELKLTDEDKKRINRENNDNRIAAERRSEKLLAIGQADSGANRALLKLWEELNPANVLDRRCIYSGRQISIDMLFSAAVEVDHILPFAATLDDSNGNKIVCLREANREKRKRSPHDAWGHSARWDEIAARAAQLPRNKRWRFEPDAMDKFRDEGGFQARHLVDTQYLARLSREYLATLYPEKGEGSGHIWVSPGRLTEMVRRKLGLNDLLPDHNFGGGADQAKNRLDHRHHAIDAVVVAIVDRGMLNAIARASGQEGAEGRERIIIPEPWDGFRDALRETVNRITVSHRTDHGTASKAGLPKGKDATAGRLHNDTAYGFTGDTDAKGNSIVVRRVPLSSFKKLADLDRIRDADLKAALYQHLNGLEGKAFEKALAEFHKLEWHNFGGVRRVRVTEPLTVIPIKDRNGRIYKGYKGDSNYRYDVWELPDGKWVTNWKNEAGEAMSSVISMFDAHQSSEPPRPHPAARKILSLHQNDLLAIEREGEDRKLMRVVKFGQSGQITLAEHQQAGDLKKRDAVSNDDDPFKYFAPTSGGLKKVKARQVRIDEIGRVLDPGFPARTARRKTRG

SEQ ID NO: 636 - protein, 1084 aa, Sporolactobacillus vineae
MKYSIGLDIGISSVGWSVINLDRERIELMGARLFDAAENPKNGSSLAAPRRDARSARRRLRRRRYRVGRVRHFIIDRGLVTRGQADQLFDWKDGDLDIWLVRVNALERLLTDREFARVLIHIAKNRGYRSNRKSEAKSGENGQVLSAIKANKELMEEKGYQTVAEMLVNEPETFAGRKRNRGGEYTHVIARSELEHEIRLIFTKQRAFGNRFATEENENTYVKIWAAQRPVATKDDILKKIGDCTFEKGEKRAPKASYAFQYFRALDKLNRLRILSVREPSRNLTDDERNLIVPALFNHDKQKYSDLRKILQLRDDQKFNELFYDPGKSLKENENKTFLSLAEQYKIRKVIRDVQGKDGLLQYRPLDIDTIAYALTVFKDDQDTRDYLSNTFVNGNGKQVLNLANRAFDAELIDGLLSLSFAKFGHLSLKALHKLIPHMEQGLSYYDACKKVGYHDNEQVGKSKQHLLPVIPADEIRNPVVVRSLSQTRKVINAIIKRYGSPTFMYIELAREMGRPYNERRDLEKQYNKNRTVNDSAIEQIHELYPEIGAPRGHDILKYKLWQQQDCKCAYSLEKIPAEKIFEPGYAEVDHIIPYSRSFDDSNSNKVLVLSRMNQEKKNRTPYEWFGGDEHRWNKFESYVNALKVNRKKKSLLTKKNMDTEEEDTFKSRHLNDTRYITRFIKSFVEDNLLFREIEGAKQHVFTVNGAYTSLMRKRWGFNKNREESDLHHSVDAVIIAVSQPFRNEVSRYFKHREISLPQLLKRTWDYFPEPWEGFVKELRARTLQDPEKLKLALESLDLDSYDPEFIDEVKPIFISRMPKRSIKGQIHDETLRRNRGKTKDGFVKIVTRTRLENIKFDKNGDFPMYGRESDPKTYQAIKQRYLENNKDKKKAFIEPLYKPAKNPNNASLIRSVKIEDKANQIVPLRDEAVAYNASIVRTEVYRNKETGKFYLAPVYVSDVFAGREPRRFIRANVPYEQWVNITDKFTFLFNLYPNDVIYIKMKKVKTTKSNINKTISWQESYFYFKGTDIHTGAITIIDHMNSFTDRVGTQGLQLFEKYQVDPLGNLSRVHGETQYGVPALSHS

SEQ ID NO: 637 - protein, 475 aa, Staphylococcus massiliensis
MGQDYILGLDIGITSVGYGLIDYHDKSVIDAGVRLFKEANVENNEGRRSKRGSRRLQRRRKHRLARTRNLLESYQLNPFPKCEKNPYEIRVKGFKEVLTSDELSAALLHLAKRRGIDNVHVTDTESDSSDNGLSTKEQLAKNQKALESRYVCELQLERLLNDNKVRGANNRFKTQDFVREAKQILSIQKDHHNLDQVFIDKYISLLETRREYYEGPGKGSPYGWDGDIKKWYELLMGRCTYFPESLRSVKYAYSADLFNALNDLNNLVIVRDENDKLTYPEKYHIVENVFKQRKKPTLKQIAKEIDVAPEDIRGYRVTASGTPVFTSFKLYHDIKSVTSNDKVLEDTELLDAIAEVLTIYQSPIEVQEKLESLNVILTKEEIEGISKLTGYTGTHALSLKAIQIVIDELWETNDNQMTIFTRLNMKPQKVDLAKANKIPTSLVEDFIISPVAKRAFIQSIKVINAVIKNMVCLKI

SEQ ID NO: 638 - protein, 581 aa, Staphylococcus massiliensis
MPKDIIIELAREKNSDEERKIIRDVQKRNQQTRDLVDKVIKETGKTKAKGMVEKLILHDKQEGKCLYSLKSIPLEDLLNNPHHYEVDHIIPRSVSYDNSMNNKVLVLQEENSKKSNQTPFQYFNSSNTHITFKQFKQHVLNLSKTKDRITKKKKEYLLEERDINKFSVQKEFINRNLVDTRYATRELMTLLRAYFSANELDVKVKAINGGFTSYLRKRWDFKKDRNAGYKHHAEDALIIANVDFIFKQLKALDNAKKVMEGRKVQVEKDNVEDNEHYESLFREPDQIKEIKLYDNYKFSHRVDKKPNRELINDTIYSTRKVDNKTYTIQTVNNIYDKQNDQLKKLFNKSPEKFLMYKHDPKTFDKLATIMRQYKNEKNPLYKFHDETGEYLTKYAKKDNGPIVKSLKYIGKQVNAHLDITNDYENSNNKVVKLSLKPFRFDVYLDDGKYKFVTVKYLDIIKKDTYYVIDEEKYKLALQQKKISENAKFIGSFYNNDLIKINGELLRVIGVNDDAKNTLELNMIDISYRDYVENMNLATTPRIRKNIGKSITILEKYTTDILGNTFKISSPEKPQFIFKVRD

SEQ ID NO: 639 - protein, 1334 aa, Staphylococcus pseudintermedius; identical to SEQ ID NO: 205

SEQ ID NO: 640 - protein, 1112 aa, Staphylococcus simulans; identical to SEQ ID NO: 252

SEQ ID NO: 641 - protein, 773 aa, Streptococcus agalactiae
MNKPYSIGLDIGTNSVGWSIITDDYKVPAKKMRVLGNTDKEYIKKNLIGALLFDGGNTAADRRLKRTARRRYTRRRNRILYLQEIFAEEMSKVDDSFFHRLEDSFLVEEDKRGSKYPIFATLQEEKDYHEKFSTIYHLRKELADKKEKADLRLIYIALAHIIKFRGHFLIEDDSFDVRNTDISKQYQDFLEIFNTTFENNDLLSQNVDVEAILTDKISKSAKKDRILAQYPNQKSTGIFAEFLKLIVGNQADFKKYFNLEDKTPLQFAKDSYDEDLENLLGQIGDEFADLFSAAKKLYDSVLLSGILTVIDLSTKAPLSASMIQRYDEHREDLKQLKQFVKASLPEKYQEIFADSSKDGYAGYIEGKTNQEAFYKYLSKLLTKQEDSENFLEKIKNEDFLRKQRTFDNGSIPHQVHLTELKAIIRRQSEYYPFLKENQDRIEKILTFRIPYYIGPLAREKSDFAWMTRKTDDSIRPWNFEDLVDKEKSAEAFIHRMTNNDFYLPEEKVLPKHSLIYEKFTVYNELTKVRYKNEQGETYFFDSNIKQEIFDGVFKEHRKVSKKKLLDFLAKEYEEFRIVDVIGLDKENKAFNASLGTYHDLEKILDKDFLDNPDNESILEDIVQTLTLFEDREMIKKRLENYKDLFTESQLKKLYRRHYTGWGRLSAKLINGIRDKESQKTILDYLIDDGRSNRNFMQLINDDGLSFKSIISKAQAGSHSDNLKEVVGELAGSPAIKKGILQSLKIVDELVKVMGYEPEQIVVEMARENQTTNQ

SEQ ID NO: 642 - protein, 1370 aa, Streptococcus agalactiae
MNKPYSIGLDIGTNSVGWSIITDDYKVPAKKMRVLGNTDKEYIKKNLIGALLFDGGNTAADRRLKRTARRRYTRRRNRILYLQEIFAEEMSKVDDSFFHRLEDSFLVEEDKRGSKYPIFATMQEEKDYHEKFPTIYHLRKELADKKEKADLRLVYLALAHIIKFRGHFLIEDDRFDVRNTDIQKQYQAFLEIFDTSFENNHLLSQNVDVEAILTDKISKSAKKDRILAQYPNQKSTGIFAEFLKLIVGNQADFKKHFNLEDKTPLQFAKDSYDEDLENLLGQIGDEFADLFSAAKKLYDSVLLSGILTVTDLSTKAPLSASMIQRYDEHREDLKQLKQFVKASLPEKYQEIFADSSKDGYAGYIEGKTNQEAFYKYLSKLLTKQEDSEYFLEKIKNEDFLRKQRTFDNGSIPHQVHLTELKAIIRRQSEYYPFLKENQDKIEKILTFRIPYYVGPLARGNSDFAWMTRKTDDSIRPWNFEDLVDKEKSAEAFIHRMTNNDLYLPEEKVLPKHSLIYEKFTVYNELTKVRYKNEQGETYFFDSNVKQEIFDGVFKEHRKVSKKQLLDFLAKEFEEFRIVDVTGLDKENKAFNASLGTYHDLKKILDKDFLDNPDNESILEDIVQTITLFEDREMIKKRLENYKDLFTESQLKKLYRRHYTGWGRLSAKLINGIRDRESQKTILDYLISDGRANRNFMQLINDDGLSFKSIISKAQSGSHSDNLKEVVGELAGSPAIKKGILQSLKIVDELVKVMGYEPEQIVVEMARENQTTNQGRRNSRQRYKLLEDGVKNLASDLNGDILKEYPTDNQALQNERLFLYYLQNGRDMYTGEALDIDNLSQYDIDHIVPQAFIKDDSIDNRVLVSSAKNRGKSDDVPSIDIVKARKAFWKKLLDAKLISQRKYDNLTKAERGGLTPDDKAGFIQRQLVETRQITKHVARILDERFNNKVDDNNKPIRKVKIVTLKSNLVSNFRKEFGFYKIREVNNYHHAHDAYLNAVVAKAILTKYPQLEPEFVYGDYPKYNSYKTRKSATEKLFFYSNIMNFFKTKVTLADETVVVKDDIEVNNETGEIAWDKKKHFATVRKVLSYPQVNIVKKTEVQTGGFSKESILAHSNSDKLIPRKTKDIYLDPKKYGGFDSPIVAYSVLVLADIKKGKAQKLKTVKELIGITIMERERFEKNPSAFLESKGYLNIRTDKLIILPKYSLFELENGRRRLLASAGELQKGNELALPTQYMKFLYLASRYNESKGKPEEIEKKQEFVNQHVSYFDDILQLINDFSKRVILADANLEKINKLYSDNKDNTPVDELAKNIINLFTFTSLGAPAAFKFFDKSVDRKRYTSTKEVLDSTLIHQSITGLYETRIDLGKLGED

SEQ ID NO: 643 - protein, 1370 aa, Streptococcus agalactiae
MNKPYSIGLDIGTNSVGWSIITDDYKVPAKKMRVLGNTDKEYIKKNLIGALLFDGGNTAADRRLKRTARRRYTRRRNRILYLQEIFAEEMSKVDDSFFHRLEDSFLVEEDKRGSKYPIFATMQEEKDYHEKFPTIYHLRKELADKKEKADLRLVYLALAHIIKFRGHFLIEDDRFDVRNTDIQKQYQAFLEIFDTSFENNHLLSQNVDVEAILTDKISKSAKKDRILAQYPNQKSTGIFAEFLKLIVGNQADFKKHFNLEDKTPLQFAKDSYDEDLENLLGQIGDEFADLFSAAKKLYDSVLLSGILTVTDLSTKAPLSAYMIQRYDEHREDLKQLKQFVKASLPEKYQEIFADSSKDGYAGYIEGKTNQEAFYKYLSKLLTKQEDSEYFLEKIKNEDFLRKQRTFDNGSIPHQVHLTELKAIIRRQSEYYPFLKENQDKIEKILTFRIPYYVGPLARGNSDFAWMTRKTDDSIRPWNFEDLVDKEKSAEAFIHRMTNNDLYLPEEKVLPKHSLIYEKFTVYNELTKVRYKNEQGETYFFDSNVKQEIFDGVFKEHRKVSKKQLLDFLAKEFEEFRIVDVTGLDKENKAFNASLGTYHDLKKILDKDFLDNPDNESILEDIVQTITLFEDREMIKKRLENYKDLFTESQLKKLYRRHYTGWGRLSAKLINGIRDRESQKTILDYLISDGRANRNFMQLINDDGLSFKSIISKAQSGSHSDNLKEVVGELAGSPAIKKGILQSLKIVDELVKVMGYEPEQIVVEMARENQTTNQGRRNSRQRYKLLEDGVKNLASDLNGDILKEYPTDNQALQNERLFLYYLQNGRDMYTGEALDIDNLSQYDIDHIVPQAFIKDDSIDNRVLVSSAKNRGKSDDVPSIDIVKARKAFWKKLLDAKLISQRKYDNLTKAERGGLTPDDKAGFIQRQLVETRQITKHVARILDERFNNKVDDNNKPIRKVKIVTLKSNLVSNFRKEFGFYKIREVNNYHHAHDAYLNAVVAKAILTKYPQLEPEFVYGDYPKYNSYKTRKSATEKLFFYSNIMNFFKTKVTLADETVVVKDDIEVNNETGEIAWDKKKHFATVRKVLSYPQVNIVKKTEVQTGGFSKESILAHSNSDKLIPRKTKDIYLDPKKYGGFDSPIVAYSVLVLADIKKGKAQKLKTVKELIGITIMERERFEKNPSAFLESKGYLNIRTDKLIILPKYSLFELENGRRRLLASAGELQKGNELALPTQYMKFLYLASRYNESKGKPEEIEKKQEFVNQHISYFDDILQLINDFSKRVILADANLEKINKLYSDNKDNTPVDELAKNIINLFTFTSLGAPAAFKFFDKSVDRKRYTSTKEVLDSTLIHQSITGLYETRIDLGKLGED

SEQ ID NO: 644 - protein, 1378 aa, Streptococcus agalactiae
MNKPYSIGLDIGTNSVGWSIITDDYKVPAKKMRVLGNTDKEYIKKNLIGALLFDGGNTAADRRLKRTARRRYTRRRNRILYLQEIFAEEMSKVDDSFFHRLEDSFLVEEDKRGSKYPIFATMQEEKYYHEKFPTIYHLRKELADKKEKADLRLIYLALAHIIKFRGHFLIEDDRFDVRNTDIQKQYQAFLEIFDTTFENNDLLSQNVDVEAILTDKISKSAKKDRILARYPNQKSTGIFAEFLKLIVGNQADFKKHFNLEDKTPLQFAKDSYDEDLENLLGQIGDEFADLFSAAKKLYDSVLLSGILTVIDLSTKAPLSASMIQRYDEHHEDLKHLKQFVKASLPENYREVFADSSKDGYAGYIEGKTSQEAFYKYLLKLLTKQEGSEYLLEKIKNEDFLRKQRTFDNGSIPHQVHLTELRAIIRRQSEYYPFLKENLDRIEKILTFRIPYYVGPLAREKSDFAWMTRKTDDSIRPWNFEDLVDKEKSAEAFIHRMTNNDLYLPEEKVLPKHSLIYEKFTVYNELTKVRFLAEGFKDFQFLNRKQKETIFNSLFKEKRKVTEKDIISFLNKVDGYEGIAIKGIEKQFNASLSTYHDLKKILGKDFLDNTDNELILEDIIQTLTLFEDREMIKKRLDIYKDFFTESQLKKLYRRHYTGWGRLSAKLINGIRNKENQKTILDYLIDDGSANRNFMQLIKDAGLSFKPIIDKARTGSHSDNLKEVVGELAGSPAIKKGILQSLKIVDELVKVMGYEPEQIVVEMARENQTTAKGLSRSRQRLTTLRESLGNLKSNILEEKKPKYVKDQVENHHLSDDRLFLYYLQNGKDMYTDDELDIDNLSQYDIDHIIPQAFIKDDSIDNRVLVSSAKNRGKSDDVPSIEIVKARKMFWKNLLDAKLMSQRKYDNLTKAERGGLTSDDKARFIQRQLVETRQITKHVARILDERFNNELDSKGRRIRKVKIVTLKSNLVSNFRKEFGFYKIREVNNYHHAHDAYLNAVVAKAILTKYPQLEPEFVYGLYRRKKLSKIVREDKEEKYSEATRKMFFYSNLMNMFKRVVRLADGSIVVRPVIETGRYMGKTAWDKKKHFATVRKVLSYPQNNIVKKTEIQTGGFSKESILAHGNSDKLIPRKTKDIYLDPKKYGGFDSPIVAYSVLVVADIKKGKAQKLKTVTELLGITIMERSRFEKNTSAFLESKGYLNIRDDKLMILPKYSLFELENGRRRLLASAGELQKGNELALPTQFMKFLYLASRYNESKGKPEEIEKKQEFVNQHVSYFDDILQLINDFSNRVILADANLEKINKLYQDNKENIPVDELANNIINLFTFTSLGAPAAFKFFDKIVDRKRYTSTKEVLNSTLIHQSITGLYETRIDLGKLGEG

SEQ ID NO: 645 - protein, 1370 aa, Streptococcus agalactiae
MNKPYSIGLDIGTNSVGWSIITDDYKVPAKKMRVLGNTDKEYIKKNLIGALLFDGGNTAADRRLKRTARRRYTRRRNRILYLQEIFAEEMSKVDDSFFHRLEDSFLVEEDKRGSKYPIFATMQEEKYYHEKFPTIYHLRKELADKKEKADLRLIYLALAHIIKFRGHFLIEDDRFDVRNTDIQKQYQAFLEIFDTTFENNDLLSQNVDVEAILTDKISKSAKKDRILARYPNQKSTGIFAEFLKLIVGNQADFKKHFNLEDKTPLQFAKDSYDEDLENLLGQIGDEFADLFSAAKKLYDSVLLSGILTVTDLSTKAPLSASMIQRYDEHREDLKQLKQFVKASLPEKYQEIFADSSKDGYAGYIEGKTNQEAFYKYLSKLLTKQEGSEYLLEKIKNEDFLRKQRTFDNGSIPHQVHLTELRAIIRRQSEYYPFLKENLDRIEKILTFRIPYYVGPLAREKSDFAWMTRKTDDSIRPWNFEDLVDKEKSAEAFIHRMTNNDLYLPEEKVLPKHSLIYEKFTVYNELTKVRFLAEGFKDFQFLNRKQKETIFNSLFKEKRKVTEKDIISFLNKVDGYEGIAIKGIEKQFNASLSTYHDLKKILGKDFLDNTDNELILEDIVQTLTLFEDREMIRKRLDIYKDFFTESQLKKLYRRHYTGWGRLSAKLINGIRNKENQKTILDYLIDDGSANRNFMQLIKDAGLSFKPIIDKARTGSHSDNLKEVVGELAGSPAIKKGILQSLKIVDELVKVMGYEPEQIVVEMARENQTTAKGLSRLRQRLTTLRESLANLKSNILEEKKPKYVKDQVENHHLSDDRLFLYYLQNGKDMYTDDELDIDNLSQYDIDHIIPQAFIKDDSIDNRVLVSSAKNRGKSDDVPSVEIVKDCKVFWKKLLDAKLMSQRKYDNLTKAERGGLTSDDKARFIQRQLVETRQITKHVARILDERFNNELDSKGRRIRKVKIVTLKSNLVSNFRKEFGFYKIREVNNYHHAHDAYLNAVVAKAILTKYPQLEPEFVYGDYPKYNSYKTRKSATEKLFFYSNIMNFFKTKVTLADGTVVVKDDIEVNNDTGEIVWDKKKHFATVRKVLSYPQVNIVKKTEIQTGGFSKESILAHGNSDKLIPRKTKDIYLDPKKYGGFDSPIVAYSVLVVADIKKGKAQKLKTVTELLGITIMERSRFEKNPSAFLESKGYLNIRDDKLMILPKYSLFELENGRRRLLASADELQKGNELALPTQFMKFLYLASRYNELKGKPEEIEQKQEFVVQHVSYFDDILQIINDFSNRVILADANLEKINKLYQDNKENIPVDELANNIINLFTFTSLGAPAAFKFFDKIVDRKRYTSTKEVLNSTLIHQSITGLYETRIDLGKLGED

SEQ ID NO: 646 - protein, 1377 aa, Streptococcus agalactiae
MNKPYSIGLDIGTNSVGWSIITDDYKVPAKKMRVLGNTDKEYIKKNLIGALLFDGGNTAADRRLKRTARRRYTRRRNRILYLQEIFAEEMSKVDDSFFHRLEDSFLVEEDKRGSKYPIFATMQEEKYYHEKFPTIYHLRKELADKKEKADLRLVYLALAHIIKFRGHFLIEDDRFDVRNTDIQKQYQAFLEIFDTTFENNHLLSQNVDVEAILTDKISKSAKKDRILAQYPNQKSTGIFAEFLKLIVGNQADFKKHFNLEDKTPLQFAKDSYDEDLENLLGQIGDEFADLFSVAKKLYDSVLLSGILTVTDLSTKAPLSASMIQRYDEHHEDLKHLKQFVKASLPENYREVFADSSKDGYAGYIEGKTNQEAFYKYLLKLLTKQEGSEYFLEKIKNEDFLRKQRTFDNGSIPHQVHLTELRAIIRRQSEYYPFLKENQDRIEKILTFRIPYYVGPLAREKSDFAWMTRKTDDSIRPWNFEDLVDKEKSAEAFIHRMTNNDLYLPEEKVLPKHSLIYEKFTVYNELTKVRFLAEGFKDFQFLNRKQKETIFNSLFKEKRKVTEKDIISFLNKVDGYEGIAIKGIEKQFNASLSTYHDLKKILGKDFLDNTDNELILEDIVQTLTLFEDREMIKKCLDIYKDFFTESQLKKLYRRHYTGWGRLSAKLINGIRNKENQKTILDYLIDDGSANRNFMQLINDDDLSFKPIIDKARTGSHSDNLKEVVGELAGSPAIKKGILQSLKIVDELVKVMGYEPEQIVVEMARENQTTAKGLSRSRQRLTTLRESLANLKSNILEEKKPKYVKDQVENHHLSDDRLFLYYLQNGRDMYTKKALDIDNLSQYDIDHIIPQAFIKDDSIDNRVLVSSAKNRGKSDDVPSIEIVKARKMFWKNLLDAKLMSQRKYDNLTKAERGGLTSDDKARFIQRQLVETRQITKHVARILDERFNNEVDNGKKICKVKIVTLKSNLVSNFRKEFGFYKIREVNDYHHAHDAYLNAVVAKAILTKYPQLEPEFVYGMYRQKKLSKIVHEDKEEKYSEATRKMFFYSNLMNMFKRVVRLADGSIVVRPVIETGRYMGKTAWDKKKHFATVRKVLSYPQNNIVKKTEIQTGGFSKESILAHGNSDKLIPRKTKDIYLDPKKYGGFDSPIVAYSVLVVADIKKGKAQKLKTVTELLGITIMERSRFEKNPSAFLESKGYLNIRDDKLMILPKYSLFELENGRRRLLASAGELQKGNELALPTQFMKFLYLASRYNESKGKPEEIEKKQEFVNQHVSYFDDILQLINDFSKRVILADANLEKINKLYQDNKENIPVDELANNIINLFTFTSLGAPAAFKFFDKIVDRKRYTSTKEVLNSTLIHQSITGLYETRIDLGKLGED

SEQ ID NO: 647 - protein, 1370 aa, Streptococcus agalactiae
  misc_feature (117)..(117): Xaa can be any naturally occurring amino acid
MNKPYSIGLDIGTNSVGWSIITDDYKVPAKKMRVLGNTDKEYIKKNLIGALLFDGGNTAADRRLKRTARRRYTRRRNRILYLQEIFAEEMSKVDDSFFHRLEDSFLVEEDKRGSKYXIFATLQEEKDYHEKFSTIYHLRKELADKKEKADLRLIYIALAHIIKFRGHFLIEDDSFDVRNTDISKQYQDFLEIFNTTFENNDLLSQNVDVEAILTDKISKSAKKDRILAQYPNQKSTGIFAEFLKLIVGNQADFKKYFNLEDKTPLQFAKDSYDEDLENLLGQIGDEFADLFSAAKKLYDSVLLSGILTVIDLSTKAPLSASMIQRYDEHREDLKQLKQFVKASLPEKYQEIFADSSKDGYAGYIEGKTNQEAFYKYLSKLLTKQEDSENFLEKIKNEDFLRKQRTFDNGSIPHQVHLTELKAIIRRQSEYYPFLKENQDRIEKILTFRIPYYIGPLAREKSDFAWMTRKTDDSIRPWNFEDLVDKEKSAEAFIHRMTNNDFYLPEEKVLPKHSLIYEKFTVYNELTKVRYKNEQGETYFFDSNIKQEIFDGVFKEHRKVSKKKLLDFLAKEYEEFRIVDVIGLDKENKAFNASLGTYHDLEKILDKDFLDNPDNESILEDIVQTLTLFEDREMIKKRLENYKDLFTESQLKKLYRRHYTGWGRLSAKLINGIRDKESQKTILDYLIDDGRSNRNFMQLINDDGLSFKSIISKAQAGSHSDNLKEVVGELAGSPAIKKGILQSLKIVDELVKVMGYEPEQIVVEMARENQTTNQGRRNSRQRYKLLDDGVKNLASDLNGNILKEYPTDNQALQNERLFLYYLQNGRDMYTGEALDIDNLSQYDIDHIIPQAFIKDDSIDNRVLVSSAKNRGKSDDVPSLEIVKDCKVFWKKLLDAKLMSQRKYDNLTKAERGGLTSDDKARFIQRQLVETRQITKHVARILDERFNNELDSKGRRIRKVKIVTLKSNLVSNFRKEFGFYKIREVNNYHHAHDAYLNAVVAKAILTKYPQLEPEFVYGDYPKYNSYKTRKSATEKLFFYSNIMNFFKTKVTLADGTVVVKDDIEVNNDTGEIVWDKKKHFATVRKVLSYPQNNIVKKTEIQTGGFSKESILAHGNSDKLIPRKTKDIYLDPKKYGGFDSPIVAYSVLVVADIKKGKAQKLKTVTELLGITIMERSRFEKNPSAFLESKGYLNIRADKLIILPKYSLFELENGRRRLLASAGELQKGNELALPTQFMKFLYLASRYNESKGKPEEIEKKQEFVNQHVSYFDDILQLINDFSKRVILADANLEKINKLYQDNKENISVDELANNIINLFTFTSLGAPAAFKFFDKIVDRKRYTSTKEVLNSTLIHQSITGLYETRIDLGKLGED

SEQ ID NO: 648 - protein, 1370 aa, Streptococcus agalactiae
MNKPYSIGLDIGTNSVGYSVVTDDYKVPAKKMRVLGNTDKEYIKKNLIGALLFDGGNTASDRRLKRTARRRYTRRRNRILYLQEIFAEEMSKVDDSFFHRLEDSFLVEDDKRGSKYPIFATMQEEKDYHEKFPTIYHLRKELADKKEKADLRLVYLALAHIIKFRGHFLIEDDSFDVRNTDIQRQYQAFLEIFDTTFENNHLLSQNIDVEGILTDKISKSAKKDRILAQYPNQKSTGIFAEFLKLIVGNQADFKKHFNLEDKTPLQFAKDSYDEDLENLLGQIGDEFADLFSVAKKLYDSVLLSGILTVTDLSTKAPLSASMIQRYDEHREDLKQLKQFVKASLPEKYQEIFTDSSKDGYAGYIEGKTNQGAFYKYLSKLLTKQEGSEYFLEKIKNEDFLRKQRTFDNGSIPHQVHLTELKAIIRRQSEYYPFLKENLDRIEKILTFRIPYYVGPLAREKSDFAWMTRKTDDSIRPWNFEELVDKEASAEAFIHRMTNNDLYLPEEKVLPKHSLIYEKFTVYNELTKVRYKNEQGETYFFDSNIKQEIFDGVFKEHRKVSKKKLLDFLAKEYEEFRIVDVIGLDKENKAFNASLGTYHDLKKILDKDFLDNPDNESILEDIVQTLTLFEDREMIKKRLENYKDLFTESQLKKLYRRHYTGWGRLSAKLINGIRDKESQKTILDYLISDGRANRNFMQLIHDDGLSFKPIIDKAQAGSHSDNLKEVVGELAGSPAIKKGILQSLKIVDELVKVMGYEPEQVVVEMARENQTTNQGRRNTRQRYKLLEEGVKNLASDLNGNILKEYPTDNQALQNERLFLYYLQNGRDMYTGEALDIDNLSQYDIDHIVPQAFIKDDSIDNRVLVSSAKNRGKSDNVPSIDIVKARKAFWKKLLDAKLMSQRKYDNLTKAERGGLTSDDKARFIQRQLVETRQITKHVARILDERFNNELDSKGRRIRKVKIVTLKSNLVSNFRKEFGFYKIREVNDYHHAHDAYLNAVVAKAILTKYPQLEPEFVYGDYPKYNSYKTRKSATEKLFFYSNIMNFFKTKVTLADGTVVVKDDIEVNNDTGEIVWDKKKHFATVRKVLSYPQVNIVKKTEIQTGGFSKESILAHGNSDKLIPRKTKDIYLDPKKYGGFDSPIVAYSVLVVADIKKGKAQKLKTVTELLGITIMERFRFEKNPSAFLESKGYLNIRDDKLMILPKYSLFELENGRRRLLASAGELQKGNELALPTQYMKFLYLASRYNELKGKPEEIEQKQEFVVQHVSYFDDILQIINDFSNRVILADANLEKINKLYQDNKENISVDELANNIINLFTFTSLGAPAAFKFFDKIVDRKRYTSTKEVLNSTLIHQSITGLYETRIDLGKLGED

SEQ ID NO: 649 - protein, 1370 aa, Streptococcus agalactiae
MNKPYSIGLDIGTNSVGYSVVTDDYKVPAKKMRVLGNTDKEYIKKNLIGALLFDGGNTASDRRLKRTARRRYTRRRNRILYLQEIFAEEMSKVDDSFFHRLEDSFLVEDDKRGSKYPIFATMQEEKDYHEKFPTIYHLRKELADKKEKANLRLVYLALAHIIKFRGHFLIEDDSFDVRNTDIQRQYQAFLEIFDTTFENNHLLSQNIDVEGILTDKISKSAKKDRILAQYPNQKSTGIFAEFLKLIVGNQADFKKHFNLEDKTPLQFAKDSYDEDLENLLGQIGDEFADLFSVAKKLYDSVLLSGILTVTDLSTKAPLSASMIQRYDEHREDLKQLKQFVKASLPEKYQEIFTDSSKDGYAGYIEGKTNQGAFYKYLSKLLTKQEGSEYFLEKIKNEDFLRKQRTFDNGSIPHQVHLTELKAIIRRQSEYYPFLKENLDRIEKILTFRIPYYVGPLAREKSDFAWMTRKTDDSIRPWNFEELVDKEASAEAFIHRMTNNDLYLPEEKVLPKHSLIYEKFTVYNELTKVRYKNEQGETYFFDSNIKQEIFDGVFKEHRKVSKKKLLDFLAKEYEEFRIVDVIGLDKENKAFNASLGTYHDLKKILDKDFLDNPDNESILEDIVQTLTLFEDREMIKKRLENYKDLFTESQLKKLYRRHYTGWGRLSAKLINGIRDKESQKTILDYLISDGRANRNFMQLIHDDGLSFKPIIDKAQAGSHSDNLKEVVGELAGSPAIKKGILQSLKIVDELVKVMGYEPEQVVVEMARENQTTNQGRRNTRQRYKLLEEGVKNLASDLNGNILKEYPTDNQALQNERLFLYYLQNGRDMYTGEALDIDNLSQYDIDHIVPQAFIKDDSIDNRVLVSSAKNRGKSDNVPSIDIVKARKAFWKKLLDAKLMSQRKYDNLTKAERGGLTSDDKARFIQRQLVETRQITKHVARILDERFNNELDSKGRRIRKVKIVTLKSNLVSNFRKEFGFYKIREVNDYHHAHDAYLNAVVAKAILTKYPQLEPEFVYGDYPKYNSYKTRKSATEKLFFYSNIMNFFKTKVTLADGTVVVKDDIEVNNDTGEIVWDKKKHFATVRKVLSYPQVNIVKKTEIQTGGFSKESILAHGNSDKLIPRKTKDIYLDPKKYGGFDSPIVAYSVLVVADIKKGKAQKLKTVTELLGITIMERFRFEKNPSAFLESKGYLNIRDDKLMILPKYSLFELENGRRRLLASAGELQKGNELALPTQYMKFLYLASRYNELKGKPEEIEQKQEFVVQHVSYFDDILQIINDFSNRVILADANLEKINKLYQDNKENISVDELANNIINLFTFTSLGAPAAFKFFDKIVDRKRYTSTKEVLNSTLIHQSITGLYETRIDLGKLGED

SEQ ID NO: 650 - protein, 1370 aa, Streptococcus agalactiae
  misc_feature (9)..(9): Xaa can be any naturally occurring amino acid
MNKPYSIGXDIGTNSVGWSIITDDYKVPAKKMRVLGNTDKEYIKKNLIGALLFDGGNTAADRRLKRTARRRYTRRRNRILYLQEIFAEEMSKVDDSFFHRLEDSFLVEEDKRGSKYPIFATLQEEKDYHEKFSTIYHLRKELADKKEKADLRLIYIALAHIIKFRGHFLIEDDSFDVRNTDISKQYQDFLEIFNTTFENNDLLSQNVDVEAILTDKISKSAKKDRILAQYPNQKSTGIFAEFLKLIVGNQADFKKYFNLEDKTPLQFAKDSYDEDLENLLGQIGDEFADLFSAAKKLYDSVLLSGILTVIDLSTKAPLSASMIQRYDEHREDLKQLKQFVKASLPEKYQEIFADSSKDGYAGYIEGKTNQEAFYKYLSKLLTKQEDSENFLEKIKNEDFLRKQRTFDNGSIPHQVHLTELKAIIRRQSEYYPFLKENQDRIEKILTFRIPYYIGPLAREKSDFAWMTRKTDDSIRPWNFEDLVDKEKSAEAFIHRMTNNDFYLPEEKVLPKHSLIYEKFTVYNELTKVRYKNEQGETYFFDSNIKQEIFDGVFKEHRKVSKKKLLDFLAKEYEEFRIVDVIGLDKENKAFNASLGTYHDLEKILDKDFLDNPDNESILEDIVQTLTLFEDREMIKKRLENYKDLFTESQLKKLYRRHYTGWGRLSAKLINGIRDKESQKTILDYLIDDGRSNRNFMQLINDDGLSFKSIISKAQAGSHSDNLKEVVGELAGSPAIKKGILQSLKIVDELVKVMGYEPEQIVVEMARENQTTNQGRRNSRQRYKLLDDGVKNLASDLNGNILKEYPTDNQALQNERLFLYYLQNGRDMYTGEALDIDNLSQYDIDHIIPQAFIKDDSIDNRVLVSSAKNRGKSDDVPSLEIVKDCKVFWKKLLDAKLMSQRKYDNLTKAERGGLTSDDKARFIQRQLVETRQITKHVARILDERFNNELDSKGRRIRKVKIVTLKSNLVSNFRKEFGFYKIREVNNYHHAHDAYLNAVVAKAILTKYPQLEPEFVYGDYPKYNSYKTRKSATEKLFFYSNIMNFFKTKVTLADGTVVVKDDIEVNNDTGEIVWDKKKHFATVRKVLSYPQNNIVKKTEIQTGGFSKESILAHGNSDKLIPRKTKDIYLDPKKYGGFDSPIVAYSVLVVADIKKGKAQKLKTVTELLGITIMERSRFEKNPSAFLESKGYLNIRADKLIILPKYSLFELENGRRRLLASAGELQKGNELALPTQFMKFLYLASRYNESKGKPEEIEKKQEFVNQHVSYFDDILQLINDFSKRVILADANLEKINKLYQDNKENISVDELANNIINLFTFTSLGAPAAFKFFDKIVDRKRYTSTKEVLNSTLIHQSITGLYETRIDLGKLGED

SEQ ID NO: 651 - protein, 1125 aa, Streptococcus anginosus
MNGLVLGLDIGIASVGVGILNKETGEIIHANSRIFPAATADSNVERRGFRQGRRLGRRKKHRSARLNNLFEEFGFITDFSAIPLNLNPYALRVKGLSEELTNEELFIALKNIIKRRGISYLDDASEDGETASNEYGKAVEENRKLLADKTPGQIQLERFEKYGQVRGDFTVVENGENHRLINVFSTSAYKKEAERILRRQQEFNVRISDEFIEAYLTILTGKRKYYHGPGNEKSRTDYGRFRTDGTTLDNIFGILIGKCTFYPDEYRAAKASYTAQEFNLLNDLNNLTVPTETKKLSPEQKRQIVEYARTAKTLGTPTLLKYIAKLVDGSIDDIKGYRIDKSDKPEMHTFDAYRKMRTLDLVNIDALSRETLDDLAHILTLNTESEGILEALNSKMPSTFTKEQIDELIQFRKKNSAVFGKGWHNFSLKLMNELISELYETSEEQMTILTRLGKQRSREISKRTKYIDEKELTEEIYNPVVAKSVRQAIKIINEATKRYGIFDNIVIEMARENNEEDAKKDYIKRQKANQDEKNASMEKAAFQYNGKKELPDSIFHGHKELATKIRLWHQQGERCLYTGKNISIRDLIHNPHQYEIDHILPLSLSFDDGLANKVLVLATANQEKGQRTPFQAIDSMDDAWSYREFKQYVRNSKSLSNKKKDYLLTEEDISKIEVKQKFIERNLVDTRYSSRVVLNTLQEFYKTNDFDTKISVVRGQFTSQLRRKWKIEKSRDTYHHHAVDALIIAASSQLRLWKKQNNPLISYKEGQFVDPETGEILSLTDDEYKELVFRPPYDYFVDTLKSKSFEDSILFSYQVDSKYNRKISDATIYGTRKAQLGKDKQEETYVLGKIKDIYSQKGYEDFIKRYNKDETQFLIYHKDPQTFEKVIEEILKTYPDKELNEKGKEIPCNPFEKYRQENGPIRKYSKKGKGPEIKSLKYYDNKLGNHIDITPVNSQNQVVLQSLKPWRTDVYFNPRTSKYELMGLKYSDLRFEKGSGSYGISPEKYNKVKAKEGVNEDSEFKFTLYKNDLILIKDTETGEQQLFRYGSRNDTSKHYVELKPYEKAKFEGNQQLMNLLGTVAKGGQCLKGINKPNLSIYKVKTDVLGNKYFIKKEGDQPQLNFKKKF

SEQ ID NO: 652 - protein, 1386 aa, Streptococcus anginosus
MNQKYSIGLDIGTNSVGWAVITDDYKVPAKKMKVLGNTDKQSIKKNLLGALLFDSGETAEATRLKRTARRRYTRRRNRLRYLQEIFAEEMMQVDESFFQRLDDSFLVDEDKRGERHPIFGNIAAEVKYHDEFPTIYHLRKHLADISQKADLRLVYLALAHMIKFRGHFLIEGQLKAENTNVQALFKDFVEVYDKTVEESHLSEITVDALSILTEKVSKSRRLENLIAHYPAEKKNTLFGNLIALFLGLQPNFKTNFQLSEDAKLQFSKDTYEEDLEGLLGEVGDEYADLFASAKNLYDAILLSGILTVDDNSTKAPLSASMVKRYEEHQKDLKKFEDFIKVNALDQYNAIFKDKNKKGYAGYIESGVKQDEFYKYLKGILLQINGSGDFLDKIDREDFLRKQRTFDNGSIPHQIHLQEMHAILRRQGEHYPFLKENQDKIEKILTFRIPYYVGPLARKGSRFAWAEYKADEKITPWNFDDILDKEKSAEKFITRMTLNDLYLPEEKVLPKHSLLYETFTVYNELTKVKYVNEQGEAKFFDANMKQEIFDHVFKENRKVTKDKLLNYLNKEFEEFRIVNLTGLDKENKVFNSSLGTYHDLRKILNKSFLDNKENAQIIEDIIQTLTLFEDREMIRQRLQKYSDIFTKAQLKKLERRHYTGWGRLSYKLINGIRNKENKKTILDYLIDDGYANRNFMQLINDDALSFKEEIAKAQIIGDVDDIANVVHDLPGSPAIKKGILQSVKIVDELVKVMGHNPANIIIEMARENQTTDRGRRNSQQRLKLLQDSLKNLDNPVNIKNVENQQLQNDRLFLYYIQNGKDMYTGETLDINNLSQYDIDHIIPQAYIKDDSFDNRVLTSSSENRGKSDNVPSIEVVCARKADWMRLRKAGLISQRKFDNLTKAERGGLTENDKAGFIKRQLVETRQITKHVAQVLDARFNAKHDENKKVIRDVKIITLKSNLVSQFRKDFKFYKVREINDYHHAHDAYLNAVIGTALLKKYPKLASEFVYGEFKKYDVRKFIAKSDKEIGKATAKYFFYSNLMNFFKKEVKFADGTVVERPDIETSEDGEIAWNKQTDFKIVRKVLSYPQVNIVKKTEVQTHGLDRGKPRGLFNANPSPKPKPDSSENLVGVKRNLDPKKYGGYAGISNSYAVLVKAIIEKGVKKKETMVLEFQGISILDRITFEKDKRAFLLGKGYKDIKKIIELPKYSLFELKDGSRRMLASILSTNNKRGEIHKGNELFVPQKFTTLLYHAKRINNPINKDHIEYVKKHRDDFKELLNYVLEFNEKYVGATKNGERLKEAVADFDSKSNEEICTSFLGAVNSKNAGLFELTSLGSASDFEFLGVKIPRYRDYTPSSLLKDSTLIHQSITGLYETRIDLSKLGED

SEQ ID NO: 653 - protein, 1396 aa, Streptococcus anginosus
MTKPYSIGLDIGTNSVGWAVITDDYKVPAKKMKVLGNTNRDYIKKNLLGALLFDGGETAEGRRLKRTARRRYTRRKNRLRYLQEIFAEEMMQVDESFFQRLDDSFLVEEDKQGSKYPIFGTLKEEKEYHKKFKTIYHLREELANSKEKADLRLVYLALAHMIKFRGHFLYEGDLKAENTDVQALFKDFVEEYDKTIEESHLSEITVDALSILTEKVSKSSRLENLIAHYPTEKKNTLFGNLIALSLGLQANFKTNFQLSEDAKLQFSKDTYEEDLEGLLGEVGDEYADLFVSAKNLYDAILLSGILTVDDNSTKAPLSASMVKRYKEHKEELAAFKRFIKEKLPKKYEEIFKDDTKNGYAGYVGADKKLRKRSGKLATEEEFYKYVKGILNKVEGADYFLDKIDREDFLRKQRTFDNGSIPHQIHLQEMHAILRRQGEHYPFLKENQDKIEKILTFRIPYYVGPLARKGSRFAWAEYKADEKITPWNFDDILDKEKSAEKFITRMTLNDLYLPEEKVLPKHSPLYETFTVYNELTKVKYVNEQGEAKFFDTNMKQEIFDHVFKENRKVTKDKLLNYLNKEFEEFRIVNLTGLDKENKAFNASLGTYHDLRKILDKSFLDDKVNEKIIEDIIQTLTLFEDREMIRQRLQKYSDIFTTQQLKELERRHYTGWGRLSYKLINGIRNKENKKTILDYLIDDGYANRNFMQLINDDALSFKEEIARAQIIGDVDDIANVVHDLPGSPAIKKGILQSVKIVDELVKVMGHNPTNIIIEMARENQTTDKGRRNSQQRLKLLQDSLKNLDNPVNIKNVENQQLQNDRLFLYYIQNGKDMYTGETLDINNLSQYDIDHIIPQAFIKDNSLDNRVLTRSDKNRGKSDDVPSIEVVHEMKSFWSKLLSVKLITQRKFDNLTKAERGGLTENDKAGFIKRQLVETRQITKHVAQVLDARFNAKHDENKKVIRDVKIITLKSNLVSQFRKDFKFYKVREINDYHHAHDAYLNAVIGTALLKKYPKLASEFVYGEFKKYDVRKFIAKSDKEIGKATAKYFFYSNLMNFFKKEVKFADGTVVERPDIETSEDGEIAWNKQTDFKIVRKVLSYPQVNIVKKTEVQTHGLDRGKPRGLFNANPSPKPKPDSSENLVGIKRNLDPKKYGGYAGISNSYAVLVKAIIEKGVKKKETMVLEFQGISILDRITFEKDKRAFLLGKGYKDIKKIIELPKYSLFELKDGSRRMLASILSTNNKRGEIHKGNELFVPQKFTTLLYHAKRINNPINKDHIEYVKKHRDDFKELLNYVLEFNEKYVGATKNGERLKEAVADFDSKSNEEICTSFLGAVNSKNAGLFELTSLGSASDFEFLGVKIPRYRDYTPSSLLKDSILIHQSITGLYETRIDLSKLGED

SEQ ID NO: 654 - protein, 1375 aa, Streptococcus canis
MEKKYSIGLDIGTNSVGWAVITDDYKVPSKKFKVLGNTNRKSIKKNLMGALLFDSGETAEATRLKRTARRRYTRRKNRIRYLQEIFANEMAKLDDSFFQRLEESFLVEEDKKNERHPIFGNLADEVAYHRNYPTIYHLRKKLADSPEKADLRLIYLALAHIIKFRGHFLIEGKLNAENSDVAKLFYQLIQTYNQLFEESPLDEIEVDAKGILSARLSKSKRLEKLIAVFPNEKKNGLFGNIIALALGLTPNFKSNFDLTEDAKLQLSKDTYDDDLDELLGQIGDQYADLFSAAKNLSDAILLSDILRSNSEVTKAPLSASMVKRYDEHHQDLALLKTLVRQQFPEKYAEIFKDDTKNGYAGYVGIGIKHRKRTTKLATQEEFYKFIKPILEKMDGAEELLAKLNRDDLLRKQRTFDNGSIPHQIHLKELHAILRRQEEFYPFLKENREKIEKILTFRIPYYVGPLARGNSRFAWLTRKSEEAITPWNFEEVVDKGASAQSFIERMTNFDEQLPNKKVLPKHSLLYEYFTVYNELTKVKYVTERMRKPEFLSGEQKKAIVDLLFKTNRKVTVKQLKEDYFKKIECFDSVEIIGVEDRFNASLGTYHDLLKIIKDKDFLDNEENEDILEDIVLTLTLFEDREMIEERLKTYAHLFDDKVMKQLKRRHYTGWGRLSRKMINGIRDKQSGKTILDFLKSDGFSNRNFMQLIHDDSLTFKEEIEKAQVSGQGDSLHEQIADLAGSPAIKKGILQTVKIVDELVKVMGHKPENIVIEMARENQTTTKGLQQSRERKKRIEEGIKELESQILKENPVENTQLQNEKLYLYYLQNGRDMYVDQELDINRLSDYDVDHIVPQSFIKDDSIDNKVLTRSVENRGKSDNVPSEEVVKKMKNYWRQLLNAKLITQRKFDNLTKAERGGLSEADKAGFIKRQLVETRQITKHVARILDSRMNTKRDKNDKPIREVKVITLKSKLVSDFRKDFQLYKVRDINNYHHAHDAYLNAVVGTALIKKYPKLESEFVYGDYKVYDVRKMIAKSEQEIGKATAKRFFYSNIMNFFKTEVKLANGEIRKRPLIETNGETGEVVWNKEKDFATVRKVLAMPQVNIVKKTEVQTGGFSKESILSKRESAKLIPRKKGWDTRKYGGFGSPTVAYSILVVAKVEKGKAKKLKSVKVLVGITIMEKGSYEKDPIGFLEAKGYKDIKKELIFKLPKYSLFELENGRRRMLASATELQKANELVLPQHLVRLLYYTQNISATTGSNNLGYIEQHREEFKEIFEKIIDFSEKYILKNKVNSNLKSSFDEQFAVSDSILLSNSFVSLLKYTSFGASGGFTFLDLDVKQGRLRYQTVTEVLDATLIYQSITGLYETRTDLSQLGGD

SEQ ID NO: 655 - protein, 1345 aa, Streptococcus constellatus
MGKPYSIGLDIGTNSVGWAVVTDDYKVPAKKMKVLGNTDKQSIKKNLLGALLFDSGETAEATRLKRTARRRYTRRKNRLRYLQEIFTGEMNKVDENFFQRLDDSFLVDEDKRGEHHPIFGNIAAEVKYHDDFPTIYHLRRHLADTSKKADLRLVYLALAHMIKFRGHFLYEGDLKAENTDVQALFKDFVEEYDKTIEESHLSEITVDALSILTEKVSKSSRLENLIAHYPTEKKNTLFGNLIALSLDLHPNFKTNFQLSEDAKLQFSKDTYEEDLEGFLGEVGDEYADLFASAKNLYDAILLSGILTVDDNSTKAPLSASMVKRYEEHQKDLKKLKDFIKVNAPDQYNAIFKDKNKKGYASYIESGVKQDEFYKYLKGILLKINGSGDFLDKIDREDFLRKQRTFDNGSIPHQIHLQEMHAILRRQGEHYPFLKENQDKIEKILTFRIPYYVGPLARKGSRFAWAEYKADEKITPWNFDDILDKEKSAEKFITRMTLNDLYLPEEKVLPKHSPLYEAFTVYNELTKVKYVNEQGEAKFFDTNMKQEIFDHVFKENRKVTKDKLLNYLNKEFEEFRIVNLTGLDKENKAFNSSLGTYHDLRKILDKSFLDDKANEKTIEDIIQTLTLFEDREMIRQRLQKYSDIFTKAQLKKLERRHYTGWGRLSYKLINGIRNKENKKTILDYLIDDGYANRNFMQLINDDALSFKEEIARAQIIDDVDDIANVVHDLPGSPAIKKGILQSVKIVDELVKVMGHNPANIIIEMARENQTTDKGRRNSQQRLKLLQDSLKNLDNPVNIKNVENQQLQNDRLFLYYIQNGKDMYTGETLDINNLSQYDIDHIIPQAFIKDNSLDNRVLTRSDKNRGKSDDVPSIEVVHEMKSFWSKLLSVKLITQRKFDNLTKAERGGLTEEDKAGFIKRQLVETRQITKHVAQILDERFNTEFDGNKRRIRNVKIITLKSNLVSNFRKEFELYKVREINDYHHAHDAYLNAVVGNALLLKYPQLEPEFVYGEYPKYNSYRSRKSATEKFLFYSNILRFFKKEDIQTNEDGEIAWNKEKHIKILRKVLSYPQVNIVKKTEEQTGGFSKESILPKGESDKLIPRKTKNSYWDPKKYGGFDSPVVAYSILVFADVEKGKSKKLRKVQDMVGITIMEKKRFEKNPVDFLEQRGYRNVRLEKIIKLPKYSLFELENKRRRLLASAKELQKGNELVIPQRFTTLLYHSYRIEKDYEPEHREYVEKHKDEFKELLEYISVFSRKYVLADNNLTKIEMLFSKNKDAEVSSLAKSFISLLTFTAFGAPAAFNFFGENIDRKRYTSVTECLNATLIHQSITGLYETRIDLSKLGED

SEQ ID NO: 656 - protein, 538 aa, Streptococcus dysgalactiae
DYDVDHIVPQSFIKDDSIDNKVLTRSDKNRGKSDNVPSEEVVKKMKNYWRQLLNAKLITQRKFDNLTKAERGGLSELDKAGFIKRQLVETRQITKHVAQILDSRMNTKYDENDKLIREVKVITLKSKLVSDFRKDFQFYKVREINNYHHAHDAYLNAVVGTALIKKYPKLESEFVYGDYKVYDVRKMIAKSEQEIGKATAKRFFYSNIMNFFKTEITLANGEIRKRPLIETNEETGEIVWDKGRDFATVRKVLSMPQVNIVKKTEVQTGALTNESIYARGSFDKLISRKHRFESSKYGGFGSPTVTYSVLVVAKSKVQDGKVKKIKTGKELIGITLLDKLVFEKNPLKFIEDKGYGNVQIDKCIRLPKYSLFEFENGTRRMLASVMANNNSRGDLQKANEMFLPAKLVTLLYHAHKIESSKELEHEAYILDHYNDLYQLLSYIERFASLYVDVEKNISKVKELFSNIESYSISEICSSVINLLTLTASGAPADFKFLGTTIPRKRYGSPQSILSSTLIHQSITGLYETRIDLSQLGGD

SEQ ID NO: 657 - protein, 1155 aa, Streptococcus dysgalactiae
MDKKYSIGLDIGTNSVGWAVITDDYKVPSKKFKVLGNTDRHSIKKNLIGALLFDSGETAEATRLKRSARRRYTRRKNRIRYLQEIFSSEMSKVDDSFFHRLEESFLVEEDKKHERHPIFGNIVDEVAYHEKYPTIYHLRKKLADSTDKADLRLIYLALAHMIKFRGHFLIEGDLNPDNSDMDKLFIQLVQTYNQLFEENPINASRVDAKAILSARLSKSRRLENLIAQLPGEKRNGLFGNLIALSLGLTPNFKSNFDLAEDAKLQLSKDTYDDDLDNLLAQIGDQYADLFLAAKNLSDAILLSDILRVNSEITKAPLSASMIKRYDEHHQDLTLLKALVRQQLPEKYKEIFFDQSKNGYAGYIDGGASQEEFYKFIKPILEKMDGTEELLAKLNREDLLRKQRTFDNGSIPHQIHLGELHAILRRQEDFYPFLKDNREKIEKILTFRIPYYVGPLARGNSRFAWMTRKSEETITPWNFEEVVDKGASAQSFIERMTNFDKNLPNEKVLPKHSLLYEYFTVYNELTKVKYVTEGMRKPEFLSGKQKEAIVDLLFKTNRKVTVKQLKEDYFKKIECFDSVEISGVEDRFNASLGTYHDLLKIIKDKDFLDNEENEDILEDIVLTLTLFEDKEMIEERLKTYAHLFDDKVMKQLKRRHYTGWGRLSRKLINGIRDKQSGKTILDFLKSDGFANRNFIQLIHDDSLTFKEAIQKAQVSGQGHSLHEQIANLAGSPAIKKGILQSVKVVDELVKVMGHKPENIVIEMARENQTTQKGQKNSRERMKRIEEGIKELGSQILKEHPVENTQLQNEKLYLYYLQNRRDMYVDQELDINRLSDYDVDHIVPQSFIKDDSIDNKVLTRSDKNRGKSDDVPSEEVVKKMKNYWRQLLNAKLITQRKFDNLTKAERGGLSELDKAGFIKRQLVETRQITKHVAQILDSRMNTKYDENDKLIREVKVITLKSKLVSDFRKDFQFYKVREINNYHHAHDAYLNAVVGTALIKKYPKLESEFVYGDYKVYDVRKMIAKSEQEIGKATAKRFFYSNIMNFFKTEITLANGEIRKRPLIETNEETGEIVWDKGRDFATVRKVLSMPQVNIVKKTEVQTGALTNESIYARGSFDKLISRKHRFESSKYGGFGSPTVTYSVLVVAKYQSYKMEK

SEQ ID NO: 658 - protein, 1371 aa, Streptococcus dysgalactiae
MDKKYSIGLDIGTNSVGWAVITDDYKVPSKKFKVLGNTDRHSIKKNLIGALLFDSGETAEATRLKRTARRRYTRRKNRIRYLQEIFSSEMSKVDDSFFHRLEESFLVEEDKKHERHPIFGNIVDEVAYHEKYPTIYHLRKKLADSTDKADLRLIYLALAHMIKFRGHFLIEGDLNPDNSDMDKLFIQLVQTYNQLFEENPINASRVDAKAILSARLSKSRRLENLIAQLPGEKRNGLFGNLIALSLGLTPNFKSNFDLAEDAKLQLSKDTYDDDLDNLLAQIGDQYADLFLAAKNLSDAILLSDILRVNSEITKAPLSASMIKRYDEHHQDLTLLKALVRQQLPEKYKEIFFDQSKNGYAGYIDGGASQEEFYKFIKPILEKMDGTEELLAKLNREDLLRKQRTFDNGSIPHQIHLGELHAILRRQEDFYPFLKDNREKIEKILTFRIPYYVGPLARGNSRFAWMTRKSEETITPWNFEEVVDKGASAQSFIERMTNFDKNLPNEKVLPKHSLLYEYFTVYNELTKVKYVTEGMRKPEFLSGKQKEAIVDLLFKTNRKVTVKQLKEDYFKKIECFDSVEISGVEDRFNASLGTYHDLLKIIKDKDFLDNEENEDILEDIVLTLTLFEDKEMIEERLKTYAHLFDDKVMKQLKRRHYTGWGRLSRKLINGIRDKQSGKTILDFLKSDGFANRNFIQLIHDDSLTFKEAIQKAQVSGQGHSLHEQIANLAGSPAIKKGILQSVKVVDELVKVMGHKPENIVIEMARENQTTQKGQKNSRERMKRIEEGIKELGSQILKEHPVENTQLQNEKLYLYYLQNGRDMYVDQELDINRLSDYDVDHIVPQSFIKDDSIDNKVLTRSDKNRGKSDDVPSEEVVKKMKNYWRQLLNAKLITQRKFDNLTKAERGGLSELDKAGFIKRQLVETRQITKHVAQILDSRMNTKYDENDKLIREVKVITLKSKLVSDFRKDFQFYKVREINNYHHAHDAYLNAVVGTALIKKYPKLESEFVYGDYKVYDVRKMIAKSEQEIGKATAKRFFYSNIMNFFKTEITLANGEIRKRPLIETNEETGEIVWNKGRDFATVRKVLSMPQVNIVKKTEVQTGALTNESIYARGSFDKLISRKHRFESSKYGGFGSPTVTYSVLVVAKSKVQDGKVKKIKTGKELIGITLLDKLVFEKNPLKFIEDKGYGNVQIDKCIKLPKYSLFEFENGTRRMLASVMANNNSRGDLQKANEMFLPAKLVTLLYHAHKIESSKELEHEAYILDHYNDLYQLLSYIERFASLYVDVEKNISKVKELFSNIESYSISEICSSVINLLTLTASGAPADFKFLGTTIPRKRYGSPQSILSSTLIHQSITGLYETRIDLSQLGGD

SEQ ID NO: 659 - protein, 1371 aa, Streptococcus dysgalactiae
MDKKYSIGLDIGTNSVGWAVITDDYKVPSKKFKVLGNTDRHSIKKNLIGALLFDSGETAEATRLKRTARRRYTRRKNRIRYLQEIFSSEMSKVDDSFFHRLEESFLVEEDKKHERHPIFGNIVDEVAYHEKYPTIYHLRKKLADSTDKADLRLIYLALAHMIKFRGHFLIEGDLNPDNSDMDKLFIQLVQTYNQLFEENPINASRVDAKAILSARLSKSRRLENLIAQLPGEKRNGLFGNLIALSLGLTPNFKSNFDLAEDAKLQLSKDTYDDDLDNLLAQIGDQYADLFLAAKNLSDAILLSDILRVNSEITKAPLSASMIKRYDEHHQDLTLLKALVRQQLPEKYKEIFFDQSKNGYAGYIDGGASQEEFYKFIKPILEKMDGTEELLAKLNREDLLRKQRTFDNGSIPHQIHLGELHAILRRQEDFYPFLKDNREKIEKILTFRIPYYVGPLARGNSRFAWMTRKSEETITPWNFEEVVDKGASAQSFIERMTNFDKNLPNEKVLPKHSLLYEYFTVYNELTKVKYVTEGMRKPEFLSGKQKEAIVDLLFKTNRKVTVKQLKEDYFKKIECFDSVEISGVEDRFNASLGTYHDLLKIIKDKDFLDNEENEDILEDIVLTLTLFEDKEMIEERLKKYANLFDDKVMKQLKRRHYTGWGRLSRKLINGIRDKQSGKTILDFLKSDGFANRNFMQLINDDSLTFKEAIQKAQVSGQGHSLHEQIANLAGSPAIKKGILQSVKVVDELVKVMGHKPENIVIEMARENQTTQKGQKNSRERMKRIEEGIKELGSQILKEHPVENTQLQNEKLYLYYLQNGRDMYVDQELDINRLSDYDVDHIVPQSFIKDDSIDNKVLTRSDKNRGKSDNVPSEEVVKKMKNYWRQLLNAKLITQRKFDNLTKAERGGLSELDKAGFIKRQLVETRQITKHVAQILDSRMNTKYDENDKLIREVKVITLKSKLVSDFRKDFQFYKVREINNYHHAHDAYLNAVVGTALIKKYPKLESEFVYGDYKVYDVRKMIAKSEQEIGKATAKRFFYSNIMNFFKTEITLANGEIRKRPLIETNEETGEIVWDKGRDFATVRKVLSMPQVNIVKKTEVQTGALTNESIYARGSFDKLISRKHRFESSKYGGFGSPTVTYSVLVVAKSKVQDGKVKKIKTGKELIGITLLDKLVFEKNPLKFIEDKGYGNVQIDKCIKLPKYSLFEFENGTRRMLASVMANNNSRGDLQKANEMFLPAKLVTLLYHAHKIESSKELEHEAYILDHYNDLYQLLSYIERFASLYVDVEKNISKVKELFSNIESYSISEICSSVINLLTLTASGAPADFKFLGTTIPRKRYGSPQSILSSTLIHQSITGLYETRIDLSQLGGD

SEQ ID NO: 660 - protein, 1371 aa, Streptococcus dysgalactiae
MDKKYSIGLDIGTNSVGWAVITDDYKVPSKKFKVLGNTDRHSIKKNLIGALLFDSGETAEATRLKRTARRRYTRRKNRIRYLQEIFSSEMSKVDDSFFHRLEESFLVEEDKKHERHPIFGNIVDEVAYHEKYPTIYHLRKKLADSTDKADLRLIYLALAHMIKFRGHFLIEGDLNPDNSDVDKLFIQLVQTYNQLFEEKPINASGVDAKAILSARLSKSKRLENLIAQLPGEKKNGLFGNLIALSLGLTPNFKSNFDLAEDAKLQLSKDTYDDDLDNLLAQIGNQYADLFLAAKNLSDAILLSDILRVNSEITKAPLSASMIKRYDEHHQDLTLLKALVRQQLPEKYKEIFFDQSKNGYAGYIDGGASQEEFYKFIKPILEKMDGTEELLAKLNREDLLRKQRTFDNGSIPHQIHLGELHAILRRQEDFYPFLKDNREKIEKILTFRIPYYVGPLARGNSRFAWMTRKSEETITPWNFEEVVDKGASAQSFIERMTNFDKNLPNEKVLPKHSLLYEYFTVYNELTKVKYVTEGMRKPEFLSGKQKEAIVDLLFKTNRKVTVKQLKEDYFKKIECFDSVEISGVEDRFNASLGTYHDLLKIIKDKDFLDNEENEDILEDIVLTLTLFEDKEMIEERLKKYANLFDDKVMKQLKRRHYTGWGRLSRKLINGIRDKQSGKTILDFLKSDGFANRNFMQLINDDSLTFKEAIQKAQVSGQGHSLHEQIANLAGSPAIKKGILQSVKVVDELVKVMGHKPENIVIEMARENQTTQKGQKNSRERMKRIEEGIKELGSQILKEHPVENTQLQNEKLYLYYLQNGRDMYVDQELDINRLSDYDVDHIVPQSFIKDDSIDNKVLTRSDKNRGKSDNVPSEEVVKKMKNYWRQLLNAKLITQRKFDNLTKAERGGLSELDKAGFIKRQLVETRQITKHVAQILDSRMNTKYDENDKLIREVKVITLKSKLVSDFRKDFQFYKVREINNYHHAHDAYLNAVVGTALIKKYPKLESEFVYGDYKVYDVRKMIAKSEQEIGKATAKRFFYSNIMNFFKTEITLANGEIRKRPLIETNEETGEIVWDKGRDFATVRKVLSMPQVNIVKKTEVQTGALTNESIYARGSFDKLISRKHRFESSKYGGFGSPTVTYSVLVVAKSKVQDGKVKKIKTGKELIGITLLDKLVFEKNPLKFIEDKGYGNVQIDKCIKLPKYSLFEFENGTRRMLASVMANNNSRGDLQKANEMFLPAKLVTLLYHAHKIESSKELEHEAYILDHYNDLYQLLSYIERFASLYVDVEKNISKVKELFSNIESYSISEICSSVINLLTLTASGAPADFKFLGTTIPRKRYGSPQSILSSTLIHQSITGLYETRIDLSQLGGD

SEQ ID NO: 661 - protein, 1370 aa, Streptococcus gallolyticus; identical to SEQ ID NO: 209

SEQ ID NO: 662 - protein, 1375 aa, Streptococcus infantarius
MEKSYSIGLDIGTNSVGWAVITDDYKVPAKKMKVLGNTDKKYIKKNLLGALLFDSGETAEVTRLKRTARRRYTRRKNRLRYLQEIFAKEMTKVDESFFQRLEESFLTDDDKTFDSHPIFGNKAEEDAYHQKFPTIYHLRKYLADSQEKADLRLVYLALAHMIKYRGHFLIEGELNAENTDVQKLFNVFVETYDKIVDESHLSEIEVDASSILTEKVSKSRRLENLIKQYPTEKKNTLFGNLIALALGLQPNFKTNFKLSEDAKLQFSKDTYEEDLEELLGKVGDDYADLFISAKNLYDAILLSGILTVDDNSTKAPLSASMIKRYVEHHEDLEKLKEFIKINKLKLYHDIFKDKTKNGYAGYIDNGVKQDEFYKYLKTILTKIDDSDYFLDKIERDDFLRKQRTFDNGSIPHQIHLQEMHSILRRQGDYYPFLKENQAKIEKILTFRIPYYVGPLARKDSRFAWANYHSDEPITPWNFDEVVDKEKSAEKFITRMTLNDLYLPEEKVLPKHSHVYETFTVYNELTKIKYVNEQGESFFFDANMKQEIFDHVFKENRKVTKAKLLSYLNNEFEEFRINDLIGLDKDSKSFNASLGTYHDLKKILDKSFLDDKTNGQIIEDIVLTLTLFEDRDMIHERLQKYSDFFTSQQLKKLERRHYTGWGRLSYKLINGIRNKENNKTILDFLIDDGHANRNFMQLINDESLSFKTIIQEAQVVGDVDDIEAVVHDLPGSPAIKKGILQSVKIVDELVKVMGDNPDNIVIEMARENQTTGYGRNKSNQRLKRLQDSLKEFGSDILSKKKPSYVDSKVENSHLQNDRLFLYYIQNGKDMYTGEELDIDRLSDYDIDHIIPQAFIKDNSIDNKVLTSSAKNRGKSDDVPSIEIVRNRRSYWYKLYKSGLISKRKFDNLTKAERGGLTEADKAGFIKRQLVETRQITKHVAQILDARFNTKRDENDKVIRDVKVITLKSNLVSQFRKEFKFYKVREINDYHHAHDAYLNAVVGTALLKKYPKLTPEFVYGEYKKYDVRKLIAKSSDDYSEMGKATAKYFFYSNLMNFFKTEVKYADGRVFERPDIETNADGEVVWNKQKDFDIVRKVLSYPQVNIVKKVEAQTGGFSKESILSKGDSDKLIPRKTKKVYWNTKKYGGFDSPTVAYSVLVVADIEKGKAKKLKTVKELVGISIMERSFFEENPVSFLEKKGYHNVQEDKLIKLPKYSLFEFEGGRRRLLASATELQKGNEVMLPAHLVELLYHAHRIDSFNSTEHLKYVSEHKKEFEKVLSCVENFSNLYVDVEKNLSKVRAAAESMTNFSLEEISASFINLLTLTALGAPADFNFLGEKIPRKRYTSTKECLSATLIHQSVTGLYETRIDLSKLGEE

SEQ ID NO: 663 - protein, 1368 aa, Streptococcus iniae
MRKPYSIGLDIGTNSVGWAVITDDYKVPSKKMRIQGTTDRTSIKKNLIGALLFDNGETAEATRLKRTTRRRYTRRKYRIKELQKIFSSEMNELDIAFFPRLSESFLVSDDKEFENHPIFGNLKDEITYHNDYPTIYHLRQTLADSDQKADLRLIYLALAHIIKFRGHFLIEGNLDSENTDVHVLFLNLVNIYNNLFEEDIVETASIDAEKILTSKTSKSRRLENLIAEIPNQKRNMLFGNLVSLALGLTPNFKTNFELLEDAKLQISKDSYEEDLDNLLAQIGDQYADLFIAAKKLSDAILLSDIITVKGASTKAPLSASMVQRYEEHQQDLALLKNLVKKQIPEKYKEIFDNKEKNGYAGYIDGKTSQEEFYKYIKPILLKLDGTEKLISKLEREDFLRKQRTFDNGSIPHQIHLNELKAIIRRQEKFYPFLKENQKKIEKLFTFKIPYYVGPLANGQSSFAWLKRQSNESITPWNFEEVVDQEASARAFIERMTNFDTYLPEEKVLPKHSPLYEMFMVYNELTKVKYQTEGMKRPVFLSSEDKEEIVNLLFKKERKVTVKQLKEEYFSKMKCFHTVTILGVEDRFNASLGTYHDLLKIFKDKAFLDDEANQDILEEIVWTLTLFEDQAMIERRLVKYADVFEKSVLKKLKKRHYTGWGRLSQKLINGIKDKQTGKTILGFLKDDGVANRNFMQLINDSSLDFAKIIKNEQEKTIKNESLEETIANLAGSPAIKKGILQSIKIVDEIVKIMGQNPDNIVIEMARENQSTMQGIKNSRQRLRKLEEVHKNTGSKILKEYNVSNTQLQSDRLYLYLLQDGKDMYTGKELDYDNLSQYDIDHIIPQSFIKDNSIDNTVLTTQASNRGKSDNVPNIETVNKMKSFWYKQLKSGAISQRKFDHLTKAERGALSDFDKAGFIKRQLVETRQITKHVAQILDSRFNSNLTEDSKSNRNVKIITLKSKMVSDFRKDFGFYKLREVNDYHHAQDAYLNAVVGTALLKKYPKLEAEFVYGDYKHYDLAKLMIQPDSSLGKATTRMFFYSNLMNFFKKEIKLADDTIFTRPQIEVNTETGEIVWDKVKDMQTIRKVMSYPQVNIVMKTEVQTGGFSKESIWPKGDSDKLIARKKSWDPKKYGGFDSPIIAYSVLVVAKIAKGKTQKLKTIKELVGIKIMEQDEFEKDPIAFLEKKGYQDIQTSSIIKLPKYSLFELENGRKRLLASAKELQKGNELALPNKYVKFLYLASHYTKFTGKEEDREKKRSYVESHLYYFDEIMQIIVEYSNRYILADSNLIKIQNLYKEKDNFSIEEQAINMLNLFTFTDLGAPSAFKFFNGDIDRKRYSSTNEIINSTLIYQSPTGLYETRIDLSKLGGK

SEQ ID NO: 664 - protein, 1392 aa, Streptococcus mitis
MNNNNYSIGLDIGTNSVGWAVITDDYKVPSKKMKVLGNTDKHFIKKNLIGALLFDEGATAEDRRFKRTARRRYTRRKNRLRYLQEIFSEEMSKVDSSFFHRLDDSFLVPEDKRGSKYPIFATLAEEKEYHKKFPTIYHLRKHLADSKEKTDLRLIYLALAHMIKYRGHFLYEESFDIKNNDIQKIFSEFISIYDNTFEGSSLSGQNAQVEAIFTDKISKSAKRERILKLFAYEKSTDLFSEFLKLIVGNQADFKKHFDLEEKAPLQFSKDTYDEDLENLLGQIGDDFADLFLVAKKLYDAILLSGILTVTDSSTKAPLSASMIERYENHQKDLAALKQFIQNNLQEKYDEVFSDQSKDGYARYINGKTTQEAFYKYIKNLLSKFEGSDYFLDKIEREDFLRKQRTFDNGSIPHQIHLQEMNAIIRRQGEHYPFLKEYKEKIETILTFRIPYYVGPLARGNRNFAWLTRNSDQAIRPWNFEEIVDQASSAEEFINKMTNYDLYLPEEKVLPKHSLLYETFAVYNELTKVKFISEGLRDYQFLDSGQKKQIVNQLFKEKRKVTEKDIIQYLHNVDGYDGIELKGIEKQFNASLSTYHDLLKIIKDKEFMDDPKNEEILENIVHTLTIFEDREMIKQRLAQYASIFDKKVIKALTRRHYTGWGKLSAKLINGICDKKTGKTILDYLIDDGYSNRNFMQLINDDGLSFKDIIQKAQVVGKTNDVKQVVQELPGSPAIKKGILQSIKLVDELVKVMGHAPESIVIEIARENQTTARGKKNSQQRYKRIEDALKNLAPGLDSNILKEHPTDNIQLQNDRLFLYYLQNGKDMYTGEALDINQLSSYDIDHIVPQAFIKDDSLDNRVLTSSKDNRGKSDNVPSLEVVQKRKAFWQQLLDSKLISEHKFNNLTKAERGGLDERDKVGFIRRQLVETRQITKHVAQILDARFNTEVNEKDKKNRTVKIITLKSNLVSNFRKEFKLYKVREINDYHHAHDAYLNAVVAKAILKKYPKLEPGFVYGDYQKYDIKRYISRSKDPKEVEKATEKYFFYSNLLNFFKEEVHYADGTIVKRENIEYSKDTGEIAWNKEKDFATIKKVLSLPQVNIVKKTEIQTHGLDRGKPRGLFNSNPSPKPSEDRKENLVPIKQGLDPRKYGGYAGISNSYAVLVKAIIEKGAKKQQKTVLEFQGISILDKINFEKNKENYLLEKGYIKILSTITLPKYSLFEFPDGTRRRLASILSTNNKRGEIHKGNELVIPEKYTTLLYHAKNINKTLEPEHLEYVEKHRNDFAKLLEYVLNFNDKYVGALKNGERIRQAFIDWETVDIEKLCFSFIGPRNSKNAGLFELTSQGSASDFEFLGVKIPRYRDYTPSSLLNATLIHQSITGLYETRIDLSKLGED

SEQ ID NO: 665 - protein, 1134 aa, Streptococcus mutans
MANGKILGLDIGIASVGVGIIDKETGKIIHVNSRIFPAATADSNVERRGFRQGRRLVRRKKHRKVRLADLFLDSNLLTDFSKVSLNLNPYQLRVKGLNEELSNEELFIALKSIVSRRGISYLDDASEDSGANSSEYGKAVEENRKLLEDRTPGQIQLERFEKYGKVRGDFTVVENGENHRLINVFSTSAYKKEAERILRRQQEFNMRIADEFIEAYLTILTGKRKYYHGPGNEKSRTDYGRFRTDGTTLDNIFGILIGKCTFYPDEYRAAKASYTAQEFNLLNDLNNLTVPTETKKLSEEQKRQIIEHAKTVKTLGAPTLLKYIVKLVGCSADDIKGYRIDKSDKPEIHTFEAYRKMRTMELIKVDDLSRESLDALAHILTLNTEREGIEEAIRDRFTNKEFNQEQINELVLFRKNNSSLFGKGWHNFSLKLMKELIPELYETSEEQMTILTRLGKQRVKKSSNRTNYIDEKELTEEIYNPVVAKSVRQAIKIINLATKKYGVFDNIVIEMARESNEDDEKKAIQNAQKANEDEKKAALLKAAHQFNGKEELPDSIFHGHKELLTKIRLWHQQGEKCLYTGKTIFINDLIHNPYKYEIDHILPLSLSFDDSLANKVLVLSTANQEKGQRTPFQSLDSMDGAWTYREFKSYVKGLKTLSNKKKDYLLTEENIDKIEVKQKFIERNLVDTRYSSRVVLNALQDFYKERKFDTKISVVRGQFTSQLRRKWRIEKTRETYHHHAVDALIIAASSQLNLWKKQNNPLISYKEDQFVDPETGEILSLSDDEYKKLVFKAPYEHFVDTLKSKKFEDSILFSYQVDSKYNRKISGATICGTRKAQLGKDTQEETYVLGKIKDIYSQKGYEDFIKKYKKDKTQFLMYHKDPQTFEKVIEEILKTYPDKELNEKGKEVSCNPFEKYRQENGPVRKYSKKGNGPEIKSLKYYDEVLGKNIDITPKNSLNKVVLRSLNPWRTDVYFNHETRKYEFLGLKYSDLRYLKGEHRYGILIGDYKKIKDKEGIEKESEFKFTLYKNDLILIKDTAKGKEELFRFWSRTGKDNAKTFEKNKIELKPYSKSQFEKGEDTNVLGKLYASSNQLQKSFGTLENLSIYKVRTDVLGNKYFIKKEGDKPQLNFKKKL

SEQ ID NO: 666 - protein, 1134 aa, Streptococcus mutans; identical to SEQ ID NO: 665

SEQ ID NO: 667 - protein, 1128 aa, Streptococcus mutans
MANSKILGLDIGIASVGVGIIDKETGKIIHVNSRIFPAATADSNVERRGFRQGRRLVRRKKHRKVRLADLFLDSNLLTDFSKVSLNLNPYQLRVKGLNEELSNEELFIALKSIVSRRGISYLDDASEDSGANSSEYGKAVEENRKLLEDRTPGQIQLERFEKYGKVRGDFTVVENGENHRLINVFSTSAYKKEAERILRRQQEFNIRIADEFIEAYLTILTGKRKYYHGPGNEKSRTDYGRFRTDGTTLDNIFGILIGKCTFYPDEYRAAKASYTAQEFNLLNDLNNLTVPTETKKLSEEQKRQIIEHAKTVKTLGAPTLLKYIAKLVGCSADDIKGYRIDKSDKPEIHTFEAYRKMRTMELIKVADLSRESLDALAHILTLNTEREGIEEAIRDRFTNKEFNQEQINELVLFRKNNSSLFGKGWHNFSLKLMKELIPELYETSEEQMTILTRLGKQRVKKSSNRTNYIDEKELTEEIYNPVVAKSVRQAIKIINLATKKYGVFDNIVIEMARESNEDDEKKAIQNAQKANEDEKEAALLKAAHQFNGKEELPDSIFHGHKELLTKIRLWHQQGEKCLYTGKTIFINDLIHNPYKYEIDHILPLSLSFDDSLANKVLVLSTANQEKGQRTPFQSLDSMDGAWTYREFKAYVKGLKTLSNKKKDYLLNEEDINKNEVKQKFIERNLVDTRYSSRVVLNTLQDFYKKREFDTKISVVRGQFTSQIRRKWRIEKTRETYHHHAVDALIIAASSQLNLWKKQNNPLISYKEDQFVDPETGEILSLSDDEYKELVFKAPYDHFVDTLKSKKFEDSILFSYQVDSKYNRKISDATIYGTRKARLGKDSQEETYVLGKIKDIYSQKGYEDFIKKYKKDKTQFLMYHKDPQTFEKVIEEILKTYSDKELNEKGKEVPCNPFEKYRQENGPVRKYSKKGNGPEIKSIKYYDNKLGNHIDITPNNSHHQVVLQSLKPWRTDVYFNPKSGKYELMGLKYSDLRFEKVSGDYGISVKKYNEIKSKEGVDENSEFKFTLYKNDLILIKDTESGEQELFRFLSRTMPNQKHYVELKPYDKSKFEGHQKLMDIFGEVAKGGQCLKGLNKSNISIYKVKTDVLGNKYFIKKEGDQPQLNFKKKI

SEQ ID NO: 668 - protein, 1128 aa, Streptococcus mutans; identical to SEQ ID NO: 667

SEQ ID NO: 669 - protein, 1338 aa, Streptococcus mutans
MDLIGTNSVGWAVVTDDYKVPAKKMKVLGNTDKSHIKKNLLGALLFDSGNTAADRRLKRTARRRYTRRRNRILYLQEIFAEEMSKVDDSFFHRLEDSFLVTEDKRGERHPIFGNLEEEVKYHENFPTIYHLRQYLADNPEKVDLRLVYLALAHIIKFRGHFLIEGKFDTRNNDVQRLFQEFLAVYDNTFENSSLQEQNVQVEEILTDKISKSAKKDRVLKLFPNEKSNGRFAEFLKLIVGNQADFKKHFELEEKAPLQFSKDTYEEELEVLLAQIGDNYAELFLSAKKLYDSILLSGILTVTDVSTKAPLSASMIQRYNEHQMDLAQLKQFIRQKLSDKYNEVFSDVSKDGYAGYIDGKTNQEAFYKYLKGLLNKIEGSGYFLDKIEREDFLRKQRTFDNGSIPHQIHLQEMRAIIRRQAEFYPFLADNQDRIEKILTFRIPYYVGPLARGKSDFAWLSRKSADKITPWNFDEIVDKESSAEAFINRMTNYDLYLPNQKVLPKHSLLYEKFTVYNELTKVKYKTEQGKTAFFDANMKQEIFDGVFKVYRKVTKDKLMDFLEKEFDEFRIVDLTGLDKENKAFNASYGTYHDLRKILDKDFLDNSKNEKILEDIVLTLTLFEDREMIRKRLENYSDLLTKEQVKKLERRHYTGWGRLSAELIHGIRNKESRKTILDYLIDDGNSNRNFMQLINDDALSFKEEIAKAQVIGETDNLNQVVSDIAGSPAIKKGILQSLKIVDELVKIMGHQPENIVVEMARENQFTNQGRRNSQQRLKGLTDSIKEFGSQILKEHPVEHSQLQNDRLFLYYLQNGRDMYTGEELDIDYLSQYDIDHIIPQAFIKDNSIDNRVLTSSKENRGKSDDVPSKNVVRKMKSYWSKLLSAKLITQRKFDNLTKAERGGLTDDDKAGFIKRQLVETRQITKHVARILDERFHTETDENNKKIRQVKIVTLKSNLVSNFRKEFELYKVREINDYHHAHDAYLNAVIGKALLGVYPQLEPEFVYGDYPHFHGHKENKATAKKFFYSNIMNFFKKDDVRTDKNGEIIWKKDEHISNIKKVLSYPQVNIVKKVEEQTGGFSKESILPKGNSDKLIPRKTKKFYWDTKKYGGFDSPIVAYSILVIADIEKGKSKKLKTVKALVGVTIMEKMTFERDPVAFLERKGYRNVQEENIIKLPKYSLFKLENGRKRLLASARELQKGNEIVLPNHLGTLLYHAKNIHKVDEPKHLDYVDKHKDEFKELLDVVSNFSKKYTLAEGNLEKIKELYAQNNGEDLKELASSFINLLTFTAIGAPATFKFFDKNIDRKRYTSTTEILNATLIHQSITGLYETRIDLSKLGGD

SEQ ID NO: 670 - protein, 1338 aa, Streptococcus mutans; identical to SEQ ID NO: 669

SEQ ID NO: 671 - protein, 1345 aa, Streptococcus mutans
MKKPYSIGLDIGTNSVGWAVVTDDYKVPAKKMKVLGNTDKSHIEKNLLGALLFDSGNTAEDRRLKRTARRRYTRRRNRILYLQEIFSEEMGKVDDSFFHRLEDFFLVTEDKRGERHPIFGNLEEEVKYHENFPTIYHLRQYLADNPEKVDLRLVYLALAHIIKFRGHFLIEGKFDTRNNDVQRLFQEFLAVYDNTFENSSLQEQNVQVEEILTDKISKSAKKDRVLKLFPNEKSNGRFAEFLKLIVGNQADFKKHFELEEKAPLQFSKDTYEEELEVLLAQIGDNYAELFLSAKKLYDSILLSGILTADDSSTKAPLSASMIQRYNEHQMDLAQLKQFIRQKLSDKYNEVFSDVSKDGYAGYIDGKTNQEAFYKYLKGLLNKIEGSGYFLDKIEREDFLRKQRTFDNGSIPHQIHLQEMRAIIRRQSEFYPFLADNQDRIEKILTFRIPYYVGPLARGKSDFAWLSRKSADKITPWNFDEIVDKESSAEAFINRMTNYDLYLPNQKVLPKHSLLYEKFTVYNELTKVKYKTEQGETAFFDANMKQEIFDGVFKVYRKVTKDKLMDFLEKEFDEFRIVDLTGLDKENKAFNASYGTYHDLRKILDKDFLDNSKNEKILEDIVLTLTLFEDREMIRKRLKNYSDLLTKEQLKKLERRHYTGWGRLSAELIHGIRNKESRKTILDYLIDDGNSNRNFMQLINDDALSFKEEIAKAQVIGETDNLNQVVSDIAGSPAIKKGILQSLKIVDELVKIMGHQPENIVVEMARENQFTNQGRRNSQQRLKGLTDSIKEFGSQILKEHPVENSQLQNDRLFLYYLQNGRDMYTGEELDIDYLSQYDIDHIIPQAFIKDNSIDNRVLTSSKENRGKSDDVPSKDVVRKMKPYWSKLLSAKLITQRKFDNLTKAERGGLTDDDKAGFIKRQLVETRQITKHVARILDERFNTETDENNKKIRQVKIVTLKSNLVSNFRKEFELYKVREINDYHHAHDAYLNAVIGKALLGVYPQLEPEFVYGDYPHFHGHEENKATAKKFFYSNIMNFFKKDDVRTDKNGEIIWKKDEHISNIKKVLSYPQVNIVKKVEEQTGGFSKESILPKGNSDKLIPRKTKKFYWDTKKYGGFDSPIVAYSILVIADIEKGKSKKLKTVKALVGVTIMEKMTFERDPVAFLERKGYRNVQEENIIKLPKYSLFKLENGRKRLLASARELQKGNEIVLPNHLGTLLYHAKNIHKVDEPKHLDYVDKHKDEFKELLDVVSNFSKKYTLAEGNLEKIKELYAQNNGEDLKELASSFINLLTFTAIGAPATFKFFDKNIDRKRYTSTTEILNATLIHQSITGLYETRIDLSKLGGD

SEQ ID NO: 672 - protein, 1345 aa, Streptococcus mutans; identical to SEQ ID NO: 671

SEQ ID NO: 673 - protein, 1229 aa, Streptococcus mutans
MKKPYSIGLDIGTNSVGWAVVTDDYKVPAKKMKVLGNTDKSHIEKNLLGALLFDSGNTAEDRRLKRTARRRYTRRRNRILYLQEIFSEEMGKVDDSFFHRLEDSFLVTEDKRGERHPIFGNLEEEVKYHENFPTIYHLRQYLADNPEKVDLRLVYLALAHIIKFRGHFLIEGKFDTRNNDVQRLFQEFLAVYDNTFENSSLQEQNIQVEEILTDKISKSAKKDRVLKLFPNEKSNGRFAEFLKLIVGNQADFKKHFELEEKAPLQFSKDTYEEELEVLLAQIGDNYAELFLSAKKLYDSILLSGILTVTDVGTKAPLSASMIQRYNEHQMDLTQLKQFIRQKLSDKYNEVFSDVSKDGYAGYIDGKTNQEAFYKYLKGLLNKIEGSGYFLDKIEREDFLRKQRTFDNGSIPHQIHLQEMRAIIRRQAEFYPFLADNQDRIEKILTFRIPYYVGPLARGKSDFAWLSRKSADKITPWNFDEIVDKESSAEAFINRMTNYDLYLPNQKVLPKHSLLYEKFTVYNELTKVKYKTEQGKTAFFDANMKQEIFDGVFKVYRKVTKDKLMDFLEKEFDEFRIVDLTGLDKENKVFNASYGTYHDLCKILDKDFLDNSKNEKILEDIVLTLTLFEDREMIRKRLENYSDLLTKEQVKKLERRHYTGWGRLSAELIHGIRNKESRKTILDYLIDDGNSNRNFMQLINDDALSFKEEIAKAQVIGETDNLNQVVSDIAGSPAIKKGILQSLKIVDELVKIMGHQPENIVVEMARENQFTNQGRRNSQQRLKGLTDSIKEFGSQILKEHPVENSQLQNDRLFLYYLQNGRDMYTGEELDIDYLSQYDIDHIIPQAFIKDNSIDNRVLTSSKENRGKSDDVPSKDVVRKMKPYWSKLLSAKLITQRKFDNLTKAERGGLTDDDKAGFIKRQLVETRQITKHVARILDERFNTETDENNKKIRQVKIVTLKSNLVSNFRKEFELYKVREINDYHHAHDAYLNAVIGKALLGVYPQLEPEFVYGDYPHFHGHEENKATAKKFFYSNIMNFFKKDDVRTDKNGEIIWKKDEHISNIKKVLSYPQVNIVKKVEEQTIGQNGGLFDDNPKSPLEVIPSKLVPLKKALNPEKYGGYQKPTTAYPILLIVDTKQLIPISVMDKKRFEQNPVKFLKDKGYQQIEKNNFVKLPKYTLVDIGNGIKRLWASSKEVHKGNQLVVSKKSQDLLYHAHHLDNDYSNEYVKNHY

SEQ ID NO: 674 - protein, 1229 aa, Streptococcus mutans; identical to SEQ ID NO: 673

SEQ ID NO: 675 - protein, 1345 aa, Streptococcus mutans
MKKPYSIGLDIGTNSVGWAVVTDDYKVPAKKMKVLGNTDKSHIEKNLLGALLFDSGNTAEDRRLKRTARRRYTRRRNRILYLQEIFSEEMGKVDDSFFHRLEDSFLVTEDKRGERHPIFGNLEEEVKYHENFPTIYHLRQYLADNPEKVDLRLVYLALAHIIKFRGHFLIEGKFDTRNNDVQRLFQEFLAVYDNTFENSSLQEQNVQVEEILTDKISKSAKKDRVLKLFPNEKSNGRFAEFLKLIVGNQADFKKHFELEEKAPLQFSKDTYEEELEVLLAQIGDNYAELFLSAKKLYDSILLSGILTVTDVGTKAPLSASMIQRYNEHQMDLAQLKQFIRQKLSDKYNEVFSDVSKDGYAGYIDGKTNQEAFYKYLKGLLNKIEGSGYFLDKIEREDFLRKQRTFDNGSIPHQIHLQEMRAIIRRQAEFYPFLADNQDRIEKLLTFRIPYYVGPLARGKSDFAWLSRKSADKITPWNFDEIVDKESSAEAFINRMTNYDLYLPNQKVLPKHSLLYEKFTVYNELIKVKYKTEQGKTAFFDANMKQEIFDGVFKVYRKVTKDKLMDFLEKEFDEFRIVDLTGLDKENKVFNASYGTYHDLCKILDKDFLDNSKNEKILEDIVLTLTLFEDREMIRKRLENYSDLLTKEQVKKLERRHYTGWGRLSAELIHGIRNKESRKTILDYLIDDGNSNRNFMQLINDDALSFKEEIAKAQVIGETDNLNQVVSDIAGSPAIKKGILQSLKIVDELVKIMGHQPENIVVEMARENQFTNQGRRNSQQRLKGLTDSIKEFGSQILKEHPVENSQLQNDRLFLYYLQNGRDMYTGEELDIDYLSQYDIDHIIPQAFIKDNSIDNRVLTSSKENRGKSDDVPSKDVVRKMKSYWSKLLSAKLITQRKFDNLTKAERGGLTDDDKAGFIKRQLVETRQITKHVARILDERFNTETDENNKKIRQVKIVTLKSNLVSNFRKEFELYKVREINDYHHAHDAYLNAVIGKALLGVYPQLEPEFVYGDYPHFHGHKENKATAKKFFYSNIMNFFKKDDVRTDKNGEIIWKKDEHISNIKKVLSYPQVNIVKKVEEQTGGFSKESILPKGNSDKLIPRKTKKFYWDTKKYGGFDSPIVAYSILVIADIEKGKSKKLKTVKALVGVTIMEKMTFERDPVAFLERKGYRNVQEENIIKLPKYSLFKLENGRKRLLASARELQKGNEIVLPNHLGTLLYHAKNIHKVDEPKHLDYVDKHKDEFKELLDVVSNFSKKYTLAEGNLEKIKELYAQNNGEDLKELASSFINLLTFTAIGAPATFKFFDKNIDRKRYTSTTEILNATLIHQSITGLYETRIDLNKLGGD

SEQ ID NO: 676 - protein, 1350 aa, Streptococcus mutans
MKKPYSIGLDIGTNSVGWAVVTDDYKVPAKKMKVLGNTDKSHIEKNLLGALLFDSGNTAEDRRLKRTARRRYTRRRNRILYLQEIFSEEMGKVDDSFFHRLEDSFLVTEDKRGERHPIFGNLEEEVKYHENFPTIYHLRQYLADNPEKVDLRLVYLALAHIIKFRGHFLIEGKFDTRNNDVQRLFQEFLAVYDNTFENSSLQEQNVQVEEILTDKISKSAKKDRVLKLFPNEKSNGRFAEFLKLIVGNQADFKKHFELEEKAPLQFSKDTYEEELEVLLAQIGDNYAELFLSAKKLYDSILLSGILTVTDVSTKAPLSASMIQRYNEHQMDLTQLKQFIRQKLSDKYNEVFSDVSKDGYAGYIDGKTNQEAFYKYLKGLLNKIEGSGYFLDKIEREDFLRKQRTFDNGSIPHQIHLQEMRAIIRRQAEFYSFLADNQDRIEKILTFRIPYYVGPLARGKSDFAWLSRKSADKITPWNFDEIVDKESSAEAFINRMTNYDLYLPNQKVLPKHSLLYEKFTVYNELTKVKYKTEQGKTAFFDANMKQEIFDGVFKVYRKVTKDKLMDFLEKEFDEFRIVDLTGLDKENKAFNASYGTYHDLRKILDKDFLDNSKNEKILEDIVLTLTLFEDREMIRKRLENYSDLLTKEQVKKLERRHYTGWGRLSAELIHGIRNKESRKTILDYLIDDGNSNRNFMQLINDDALSFKEEIAKAQVIGETDNLNQVVSDIAGSPAIKKGILQSLKIVDELVKIMGHQPENIVVEMARENQFTNQGRRNSQQRLKGLTDSIKEFGSQILKEHPVENSQLQNDRLFLYYLQNGRDMYTGEELDIDYLSQYDIDHIIPQAFIKDNSIDNRVLTSSKENRGKSDDVPSEDVVNRMRPFWNKLLSSGLISQRKYNNLTKKELTLDDKAGFIKRQLVETRQITKHVARMLDERFNKEFDDNNKRIRKVKIVTLKSNLVSSFRKEFELYKVREINDYHHAHDAYLNAVVVKALLVKYSKLEPEFVYGEYPKYNSYRERKTATQKMFFYSNIMNMFKSKVKLADDQIVERPMIEVNDETGEIAWDKTKHITTVKKVLSYPQVNIVKKVEEQTIGQNGGLFDDNPKSPLEVIPSKLVPLKKALNPEKYGGYQKPTTAYPILLIVDTKQLIPISVMDKKRFEQNPVKFLKDKGYQQIEKNNFVKLPKYTLVDIGNGIKRLWASSKEVHKGNQLVVSKKSQDLLYHAHHLDNDYSNEYVKNHYQQFDILFNEITSFSKKCKLGKEHIQKIEEAYSKERDSASIEELADGFIKLLGFTQLGATSPFSFLGIKLNQKQYTGKKDYLLPCMEATLIHQSITGLYETRIDLSKLGGD

SEQ ID NO: 677 - protein, 1350 aa, Streptococcus mutans
MKKPYSIGLDIGTNSVGWAVVTDDYKVPAKKMKVLGNTDKSHIEKNLLGALLFDSGNTAEDRRLKRTARRRYTRRRNRILYLQEIFSEEMGKVDDSFFHRLEDSFLVTEDKRGERHPIFGNLEEEVKYHENFPTIYHLRQYLADNPEKVDLRLVYLALAHIIKFRGHFLIEGKFDTRNNDVQRLFQEFLAVYDNTFENSSLQEQNVQVEEILTDKISKSAKKDRVLKLFPNEKSNGRFAEFLKLIVGNQADFKKHFELEEKAPLQFSKDTYEEELEVLLAQIGDNYAELFLSAKKLYDSILLSGILTVTDVSTKAPLSASMIQRYNEHQMDLTQLKQFIRQKLSDKYNEVFSDVSKDGYAGYIDGKTNQEAFYKYLKGLLNKIEGSGYFLDKIEREDFLRKQRTFDNGSIPHQIHLQEMRAIIRRQAEFYPFLADNQDRIEKILTFRIPYYVGPLARGKSDFAWLSRKSADKITPWNFDEIVDKESSAEAFINRMTNYDLYLPNQKVLPKHSLLYEKFTVYNELTKVKYKTEQGKTAFFDANMKQEIFDGVFKVYRKVTKDKLMDFLEKEFDEFRIVDLTGLDKENKAFNASYGTYHDLRKILDKDFLDNSKNEKILEDIVLTLTLFEDREMIRKRLKNYSDLLTKEQLKKLERRHYTGWGRLSAELIHGIRNKESRKTILDYLIDDGNSNRNFMQLINDDALSFKEEIAKAQVIGETDNLNQVVSDIAGSPAIKKGILQSLKIVDELVKIMGHQPENIVVEMARENQFTNQGRQNSQQRLKGLTDSIKEFGSQILKEHPVENSQLQNDRLFLYYLQNGRDMYTGEELDIDYLSQYDIDHIIPQAFIKDNSIDNRVLTSSKENRGKSDDVPSEDVVNRMRPFWNKLLSSGLISQRKYNNLTKKELTLDDKAGFIKRQLVETRQITKHVARMLDERFNKEFDDNNKRICKVKIVTLKSNLVSSFRKEFELYKVREINDYHHAHDAYLNAVVVKALLVKYSKLEPEFVYGEYPKYNSYRERKTATQKMFFYSNIMNMFKSKVKLADDQIVERPMIEVNDETGEIAWDKTKHITTVKKVLSYPQVNIVKKVEEQTIGQNGGLFDDNPKSPLEVIPSKLVPLKKALNPEKYGGYQKPTTAYPILLIVDTKQLIPISVMDKKRFEQNPVKFLKDKGYQQIEKNNFVKLPKYTLVDIGNGIKRLWASSKEVHKGNQLVVSKKSQDLLYHAHHLDNDYSNEYVKNHYQQFDILFNEITSFSKKCKLGKEHIQKIEEAYSKERDSASIEELADGFIKLLGFTQLGATSPFSFLGIKLNQKQYTGKKDYLLPCMEATLIHQSITGLYETRIDLSKLGGD

SEQ ID NO: 678 - protein, 1345 aa, Streptococcus mutans; identical to SEQ ID NO: 675

SEQ ID NO: 679 - protein, 1350 aa, Streptococcus mutans; identical to SEQ ID NO: 676

SEQ ID NO: 680 - protein, 1350 aa, Streptococcus mutans; identical to SEQ ID NO: 677

SEQ ID NO: 681 - protein, 1345 aa, Streptococcus mutans
MKKPYSIGLDIGTNSVGWAVVTDDYKVPAKKMKVLGNTDKSHIKKNLLGALLFDSGNTAADRRLKRTARRRYTRRRNRILYLQEIFAEEMSKVDDSFFHRLEDSFLVTEDKRGERHPIFGNLEEEVKYHENFPTIYHLRQYLADNPEKVDLRLVYLALAHIIKFRGHFLIEGKFDTRNNDVQRLFQEFLAVYDNTFENSSLQEQNVQVEEILTDKISKSAKKDRVLKLFPNEKSNGRFAEFLKLIVGNQADFKKHFELEEKAPLQFSKDTYEEELEVLLTQIGDNYAELFLSAKKLYDSILLSGILTVTDVSTKAPLSASMIQRYNEHQMDLAQLKQFIRQKLSDKYNEVFSDVSKDGYAGYIDGKTNQEAFYKYLKGLLNKIEGSGYFLDKIEREDFLRKQRTFDNGSIPHQIHLQEMRAIIRRQAEFYPFLADNQDRIEKILTFRIPYYVGPLARGKSDFAWLSRKSADKITPWNFDEIVDKESSAEAFINRMTNYDLYLPNQKVLPKHSLLYEKFTVYNELTKVKYKTEQGKTAFFDANMKQEIFDGVFKVYRKVTKDKLMDFLEKEFDEFRIVDLTGLDKENKAFNASYGTYHDLRKILDKDFLDNSKNEKILEDIVLTLTLFEDREMIRKRLENYSDLLTKEQVKKLERRHYTGWGRLSAELIHGIRNKESRKTLLDYLIDDGNSNRNFMQLINDDALSFKEEIAKAQVIGETDNLNQVVSDIAGSPAIKKGILQSLKIVDELVKIMGHQPENIVVEMARENQFTNQGRRNSQQRLKGLTDSIKEFGSQILKEHPVENSQLQNDRLFLYYLQNGRDMYTGEELDIDYLSQYDIDHIIPQAFIKDNSIDNRVLTSSKENRGKSDDVPSKDVVRKMKPYWSKLLSAKLITQRKFDNLTKAERGGLTDDDKAGFIKRQLVETRQITKHVARILDERFNTETDENNKKIRQVKIVTLKSNLVSNFRKEFELYKVREINDYHHAHDAYLNAVIGKALLGVYPQLEPEFVYGDYPHFHGHEENKATAKKFFYSNIMNFFKKDDVRTDKNGEIIWKKDEHISNIKKVLSYPQVNIVKKVEEQTGGFSKESILPKGNSDKLIPRKTKKFYWDTKKYGGFDSPIVAYSILVIADIEKGKSKKLKTVKALVGVTIMEKMTFERDPVAFLERKGYRNVQEENIIKLPKYSLFKLENGRKRLLASARELQKGNEIVLPNHLGTLLYHAKNIHKVDEPKHLDYVDKHKDEFKELLDVVSNFSKKYTLAEGNLEKIKELYAQNNGEDLKELSSSFINLLTFTAIGAPAAFKFFDKNIDRKRYTSTTEILNATLIHQSITGLYETRIDLSKLGGD

SEQ ID NO: 682 - protein, 1345 aa, Streptococcus mutans
MKKPYSIGLDIGTNSVGWAVVTDDYKVPAKKMKVLGNTDKSHIKKNLLGALLFDSGNTAADRRLKRTARRRYTRRRNRILYLQEIFAEEMSKVDDSFFHRLEDSFLVTEDKRGERHPIFGNLEEEVKYHENFPTIYHLRQYLADNPEKVDLRLVYLALAHIIKFRGHFLIEGKFDTRNNDVQRLFQEFLAVYDNTFENSSLQEQNVQVEEILTDKISKSAKKDRVLKLFPNEKSNGRFAEFLKLIVGNQADFKKHFELEEKAPLQFSKDTYEEELEVLLAQIGDNYAELFLSAKKLYDSILLSGILTVTDVSTKAPLSASMIQRYNEHQMDLAQLKQFIRQKLSDKYNEVFSDVSKDGYAGYIDGKTNQEAFYKYLKGLLNKIEGSGYFLDKIEREDFLRKQRTFDNGSIPHQIHLQEMRAIIRRQAEFYPFLADNQDRIEKILTFRIPYYVGPLARGKSDFAWLSRKSADKITPWNFDEIVDKESSAEAFINRMTNYDLYLPNQKVLPKHSLLYEKFTVYNELTKVKYKTEQGKTAFFDANMKQEIFDGVFKVYRKVTKDKLMDFLEKEFDEFRIVDLTGLDKENKAFNASYGTYHDLRKILDKDFLDNSKNEKILEDIVLTLTLFEDREMIRKRLENYSDLLTKEQVKKLERRHYTGWGRLSAELIHGIRNKESRKTILDYLIDDGNSNRNFMQLINDDALSFKEEIAKAQVIGETDNLNQVVSDIAGSPAIKKGILQSLKIVDELVKIMGHQPENIVVEMARENQFTNQGRRNSQQRLKGLTDSIKEFGSQILKEHPVEHSQLQNDRLFLYYLQNGRDMYTGEELDIDYLSQYDIDHIIPQAFIKDNSIDNRVLTSSKENRGKSDDVPSKNVVRKMKSYWSKLLSAKLITQRKFDNLTKAERGGLTDDDKAGFIKRQLVETRQITKHVARILDERFHTETDENNKKIRQVKIVTLKSNLVSNFRKEFELYKVREINDYHHAHDAYLNAVIGKALLGVYPQLEPEFVYGDYPHFHGHKENKATAKKFFYSNIMNFFKKDDVRTDKNGEIIWKKDEHISNIKKVLSYPQVNIVKKVEEQTGGFSKESILPKGNSDKLIPRKTKKFYWDTKKYGGFDSPIVAYSILVIADIEKGKSKKLKTVKALVGVTIMEKMTFERDPVAFLERKGYRNVQEENIIKLPKYSLFKLENGRKRLLASARELQKGNEIVLPNHLGTLLYHAKNIHKVDEPKHLDYVDKHKDEFKELLDVVSNFSKKYTLAEGNLEKIKELYAQNNGEDLKELASSFINLLTFTAIGAPATFKFFDKNIDRKRYTSTTEILNATLIHQSITGLYETRIDLSKLGGD

SEQ ID NO: 683 - protein, 1345 aa, Streptococcus mutans
MKKPYSIGLDIGTNSVGWAVVTDDYKVPAKKMKVLGNTDKSHIKKNLLGALLFDSGNTAADRRLKRTARRRYTRRRNRILYLQEIFAEEMSKVDDSFFHRLEDSFLVTEDKRGERHPIFGNLEEEVKYHENFPTIYHLRQYLADNPEKVDLRLVYLALAHIIKFRGHFLIEGKFDTRNNDVQRLFQEFLAVYDNTFENSSLQEQNVQVEEILTDKISKSAKKDRVLKLFPNEKSNGRFAEFLKLIVGNQADFKKHFELEEKAPLQFSKDTYEEELEVLLAQIGDNYAELFLSAKKLYDSILLSGILTVTDVSTKAPLSASMIQRYNEHQMDLAQLKQFIRQKLSDKYNEVFSDVSKDGYAGYIDGKTNQEAFYKYLKGLLNKIEGSGYFLDKIEREDFLRKQRTFDNGSIPHQIHLQEMRAIIRRQAEFYPFLADNQDRIEKILTFRIPYYVGPLARGKSDFAWLSRKSADKITPWNFDEIVDKESSAEAFINRMTNYDLYLPNQKVLPKHSLLYEKFTVYNELTKVKYKTEQGKTAFFDANMKQEIFDGVFKVYRKVTKDKLMDFLEKEFDEFRIVDLTGLDKENKVFNASYGTYHDLCKILDKDFLDNSKNEKILEDIVLTLTLFEDREMIRKRLENYSDLLTKEQVKKLERRHYTGWGRLSAELIHGIRNKESRKTILDYLIDDGNSNRNFMQLINDDALSFKEEIAKAQVIGETDNLNQVVSDIAGSPAIKKGILQSLKIVDELVKIMGHQPENIVVEMARENQFTKQGRRNSQQRLKGLTDSIKEFGSQILKEHPVENSQLQNDRLFLYYLQNGRDMYTGEELDIDYLSQYDIDHIIPQAFIKDNSIDNRVLTSSKENRGKSDDVPSKDVVRKMKSYWSKLLSAKLITQRKFDNLTKAERGGLTDDDKAGFIKRQLVETRQITKHVARILDERFYTETDENNKKIRQVKIVTLKSNLVSNFRKEFELYKVREINDYHHAHDAYLNAVIGKALLGVYPQLEPEFVYGDYPHFHGHKENKATAKKFFYSNIMNFFKKDDVRTDKNGEIIWKKDEHISNIKKVLSYPQVNIVKKVEEQTGGFSKESILPKGNSDKLIPRKTKKFYWDTKKYGGFDSPIVAYSILVIADIEKGKSKKLKTVKALVGVTIMEKMTFERDPVAFLERKGYRNVQEENIIKLPKYSLFKLENGRKRLLASARELQKGNEIVLPNHLGTLLYHAKNIHKVDEPKHLDYVDKHKDEFKELLDVVSNFSKKYTLAEGNLEKIKELYAQNNGEDLKELASSFINLLTFTAIGAPATFKFFDKNIDRKRYTSTTEILNATLIHQSITGLYETRIDLSKLGGD

SEQ ID NO: 684 - protein, 1345 aa, Streptococcus mutans
MKKPYSIGLDIGTNSVGWAVVTDDYKVPAKKMKVLGNTDKSHIKKNLLGALLFDSGNTAADRRLKRTARRRYTRRRNRILYLQEIFAEEMSKVDDSFFHRLEDSFLVTEDKRGERHPIFGNLEEEVKYHENFPTIYHLRQYLADNPEKVDLRLVYLALAHIIKFRGHFLIEGKFDTRNNDVQRLFQEFLAVYDNTFENSSLQEQNVQVEEILTDKISKSAKKDRVLKLFPNEKSNGRFAEFLKLIVGNQADFKKHFELEEKAPLQFSKDTYEEELEVLLAQIGDNYAELFLSAKKLYDSILLSGILTVTDVSTKAPLSASMIQRYNEHQMDLAQLKQFIRQKLSDKYNEVFSDVSKDGYAGYIDGKTNQEAFYKYLKGLLNKIEGSGYFLDKIEREDFLRKQRTFDNGSIPHQIHLQEMRAIIRRQAEFYPFLADNQDRIEKILTFRIPYYVGPLARGKSDFAWLSRKSADKITPWNFDEIVDKESSAEAFINRMTNYDLYLPNQKVLPKHSLLYEKFTVYNELTKVKYKTEQGKTAFFDANMKQEIFDGVFKVYRKVTKDKLMDFLEKEFDEFRIVDLTGLDKENKAFNASYGTYHDLRKILDKDFLDNSKNEKILEDIVLTLTLFEDREMIRKRLENYSDLLTKEQVKKLERRHYTGWGRLSAELIHGIRNKESRKTILDYLIDDGNSNRNFMQLINDDALSFKEEIAKAQVIGETDNLNQVVSDIAGSPAIKKGILQSLKIVDELVKIMGHQPENIVVEMARENQFTNQGRRNSQQRLKGLTDSIKEFGSQILKEHPVENSQLQNDRLFLYYLQNGRDMYTGEELDIDYLSQYDIDHIIPQAFIKDNSIDNRVLTSSKENRGKSDDVPSKNVVRKMKSYWSKLLSAKLITQRKFDNLTKAERGGLTDDDKAGFIKRQLVETRQITKHVARILDERFHTETDENNKKIRQVKIVTLKSNLVSNFRKEFELYKVREINDYHHAHDAYLNAVIGKALLGVYPQLEPEFVYGDYPHFHGHKENKATAKKFFYSNIMNFFKKDDVRTDKNGEIIWKKDEHISNIKKVLSYPQVNIVKKVEEQTGGFSKESILPKGNSDKLIPRKTKKFYWDTKKYGGFDSPIVAYSILVIADIEKGKSKKLKTVKALVGVTIMEKMTFERDPVAFLERKGYRNVQEENIIKLPKYSLFKLENGRKRLLASARELQKGNEIVLPNHLGTLLYHAKNIHKVDEPKHLDYVDKHKDEFKELLDVVSNFSKKYTLAEGNLEKIKELYAQNNGEDLKELSSSFINLLTFTAIGAPAAFKFFDKNIDRKRYTSTTEILNATLIHQSITGLYETRIDLSKLGGD

SEQ ID NO: 685 - protein, 1345 aa, Streptococcus mutans; identical to SEQ ID NO: 681

SEQ ID NO: 686 - protein, 1345 aa, Streptococcus mutans; identical to SEQ ID NO: 682

SEQ ID NO: 687 - protein, 1345 aa, Streptococcus mutans; identical to SEQ ID NO: 683

SEQ ID NO: 688 - protein, 1345 aa, Streptococcus mutans; identical to SEQ ID NO: 684

SEQ ID NO: 689 - protein, 1345 aa, Streptococcus mutans; identical to SEQ ID NO: 682

SEQ ID NO: 690 - protein, 1345 aa, Streptococcus mutans; identical to SEQ ID NO: 682

SEQ ID NO: 691 - protein, 1345 aa, Streptococcus mutans; identical to SEQ ID NO: 682

SEQ ID NO: 692 - protein, 1345 aa, Streptococcus mutans; identical to SEQ ID NO: 682

SEQ ID NO: 693 - protein, 1359 aa, Streptococcus mutans
MKKPYSIGLDIGTNSVGWAVVTDDYKVPAKKMKVLGNTDKSHIKKNLLGALLFDSGNTAEDRRLKRTARRRYTRRRNRILYLQEIFAEEMMQVDESFFQRLDDSFLVEEDKRGSRYPIFGTLKEEKKYHKEFKTIYHLREKLANSTEKADLRLVYLSLAHMIKFRGHFLIEGQLKAENTNVQALFKDFVEVYDKTVEESHLSEMTVDALSILTEKVSKSRRLENLVECYPTEKKNTLFGNLIALSLGLQPNFKTNFQLSEDAKLQFSKDTYEEDLEGLLGEIGDEYADLFASAKNLYDAILLSGILAVDDNTTKAPLSASMVKRYKEHKEELAAFKRFIKEKLPKKYEEIFKDDTKNGYAGYVGADKKLRKRSGKLATEEEFYKYVKGILNKVEGADVWLDKIDREDFLRKQRTFDNGSIPHQIHLQEMHAILRRQGEHYPFLKENQDKIEKILTFRIPYYVGPLVRKGSRFAWAEYKADEKITPWNFDDILDKEKSAEKFITRMTLNDLYLPEEKVLPKHSLLYETFTVYNELTKVKYVNEQGEAKFFDANMKQEIFDHVFKENRKVTKDKLLNYLNKEFEEFRIVNLTGLDKENKVFNSSLGTYHDLRKILNKSFLDNKENEQIIEDIIQTLTLFEDREMIRQRLQKYSDIFTKAQLKKLERRHYTGWGRLSYKLINGIRDKQSNKTILGYLIDDGYSNRNFMQLINDDALSFKEEIAKAQVIGEMDGLNQVVSDIAGSPAIKKGILQSLKIVDELVKVMGHNPANIVIEMARENQTTAKGRRSSQKRYKRLEEAIKNLDHDLNHKILKEHPTDNQALQNDRLFLYYLQNGRDMYTEDPLDINRLSDYDIDHIIPQAFIKDNSIDNRVLTRSDKNRGKSDDVPSEEVVHKMKPFWSKLLSAKLITQRKFDNLTKAERGGLTDDDKAGFIKRQLVETRQITKHVARILDERFNTETDENNKKIRQVKIVTLKSNLVSNFRKEFELYKVREINDYHHAHDAYLNAVIGKALLGVYPQLEPEFVYGDYPHFHGHKENKATAKKFFYSNIMNFFKKGDVRTDKNGEIIWKKDEHISNIKKVLSYPQVNIVKKVEEQTGGFSKESILPKGNSDKLIPRKTKKFYWDTKKYGGFDSPIVAYSILVIADIEKGKSKKLKTVKALVGVTIMEKMTFERDPVAFLERKGYRNVQEENIIKLPKYSLFKLENGRKRLLASARELQKGNEIVLPNHLETLLYHAKNIHKVDEPKHLDYVDKHKDEFKELLDVVSNFSKKYTLAEGNLEKIKELYAQNNGEDLKELASSFINLLTFTAIGAPAAFKFFDKNIDRKRYTSTTEILNATLIHQSITGLYETRIDLNKLGGD

SEQ ID NO: 694 - protein, 1359 aa, Streptococcus mutans; identical to SEQ ID NO: 693

SEQ ID NO: 695 - protein, 1355 aa, Streptococcus mutans
MKKPYSIGLDIGTNSVGWAVVTDDYKVPAKKMKVLGNTDKSHIKKNLLGALLFDSGNTAEDRRLKRTARRRYTRRRNRILYLQEIFAEEMSKVDDSFFHRLDESFLTDDDKNFDSHPIFGNKAEEDAYHQKFPTIYHLRKHLADSTEKADLRLVYLALAHMIKFRGHFLIEGELNAENTDVQKLFADFVGVYDRTFDDSHLSEITVDASSILTEKISKSRRLEKLINNYPKEKKNTLFGNLIALSLGLQPNFKTNFKLSEDAKLQFSKDTYEEDLEELLGKIGDDYADLFTLAKNLYDAILLSGILTADDSSTKAPLSASMIKRYAEHHEDLEKLKEFIKANKPELYHDIFKDETKNGYAGYIENGVKQDEFYKYLKNTLSKITGSDYFLDQIEREDFLRKQRTFDNGSIPHQIHLQEMHAILRRQGDYYPFLKENQDRIEKILTFRIPYYVGPLARKNSRFAWAEYHSDEAVTPWNFDQVIDKESSAQAFIEHMTNNDLYLPNEKVLPKHSPLYEKYTVYNELTKIKYVTEIGEAKFFDANLKQEIFDGLFKHERKVTKKKLRTFLDKNFDEFRIVDIQGLDKETETFNASYATYQDLLKVIKDKVFMDNPENAEILENIVLTLTLFEDREMIKQRLAKYADVFDKKVIDQLARRHYTGWGRLSAKLLNGIRDKQSCKTIMDYLIDDAQSNRNLMQLITDDNLTFKDDIVKAQYVDNSDDLHQVVQSLAGSPAIKKGILQSLKIVDELVKVMGKEPEQIVVEMARENQTTAKGRRNSQQRYKRLKEAIKSLDRDLNHKILKEHPTDNQALQNNRLFLYYLQNGRDMYTGESLDINRLSDYDIDHVIPQAFIKDNSIDNRVLTSSKANRGKSDDVPSEDVVNRMRPFWNKLLSSGLISQRKYNNLTKKELTLDDKAGFIKRQLVETRQITKHVARMLDERFNKEFDDNNKRIRRVKIVTLKSNLVSSFRKEFELYKVREINDYHHAHDAYLNAVVVKALLVKYPKLEPEFVYGEYPKYNSYRERKTATQKMFFYSNIMNMFKSKVKLADDQIVERPMIEVNDETGEIAWDKTKHITTVKKVLSYPQVNIVKKVEEQTIGQNGGLFDDNPKSPLEVIPSKLVPLKKALNPEKYGGYQKPTTAYPILLIVDTKQLIPISVMDKKRFEQNPVKFLKDKGYQQIEKNNFVKLPKYTLVDIGNGIKRLWASSKEVHKGNQLVVSKKSQDLLYHAHHLDNDYSNEYVKNHYQQFDILFNEITSFSKKCKLGKEHIQKIEEAYSKERDFASIEELADGFIKLLGFTQLGATSPFSFLGIKLNQKQYTGKKDYLLPCMEATLIHQSITGLYETRIDLSKLGGD

SEQ ID NO: 696 - protein, 1355 aa, Streptococcus mutans; identical to SEQ ID NO: 695

SEQ ID NO: 697 - protein, 1345 aa, Streptococcus mutans
MKKPYSIGLDIGTNSVGWAVVTDDYKVPAKKMKVLGNTDKSHIKKNLLGALLFDSGNTAEDRRLKRTARRRYTRRRNRILYLQEIFSEEMDKVDDSFFHRLEDSFLVTEDKRGERHPIFGNLEEEVKYHENFPTIYHLRQYLADNPEKVDLRLVYLALAHIIKFRGHFLIEGKFDTRNNDVQRLFQEFLAVYDNTFENSSLQEQNVQVEEILTDKISKSAKKDRVLKLFPNEKSNGRFAEFLKLIVGNQADFKKHFELEEKAPLQFSKDTYEEELEVLLAQIGDNYAELFLSAKKLYDSILLSGILTVTDVSTKAPLSASMIQRYNEHQMDLAQLKQFIRQKLSDKYNEVFSDVSKDGYAGYIDGKTNQEAFYKYLKGLLNKIEGSGYFLDKIEREDFLRKQRTFDNGSIPHQIHLQEMRAIIRRQAEFYPFLADNQDRIEKILTFRIPYYVGPLARGKSDFAWLSRKSADKITPWNFDEIVDKESSAEAFINRMTNYDLYLPNQKVLPKHSLLYEKFTVYNELTKVKYKTEQGKTAFFDANMKQEIFDGVFKVYRKVTKDKLMDFLEKEFDEFRIVDLTGLDKENKVFNASYGTYHDLCKILDKDFLDNSKNEKILEDIVLTLTLFEDREMIRKRLENYSDLLTKEQVKKLERRHYTGWGRLSAELIHGIRNKESRKTILDYLIDDGNSNRNFMQLINDDALSFKEEIAKAQVIGETDNLNQVVSDIAGSPAIKKGILQSLKIVDELVKIMGHQPENIVVEMARENQFTKQGRRNSQQRLKGLTDSIKEFGSQILKEHPVENSQLQNDRLFLYYLQNGRDMYTGEELDIDYLSQYDIDHIIPQAFIKDNSIDNRVLTSSKENRGKSDDVPSKDVVRKMKSYWSKLLSAKLITQRKFDNLTKAERGGLTDDDKAGFIKRQLVETRQITKHVARILDERFYTETDENNKKIRQVKIVTLKSNLVSNFRKEFELYKVREINDYHHAHDAYLNAVIGKALLGVYPQLEPEFVYGDYPHFHGHKENKATAKKFFYSNIMNFFKKDDVRTDKNGEIIWKKDEHISNIKKVLSYPQVNIVKKVEEQTGGFSKESILPKGNSDKLIPRKTKKFYWDTKKYGGFDSPIVAYSILVIADIEKGKSKKLKTVKALVGVTIMEKMTFERDPVAFLERKGYRNVQEENIIKLPKYSLFKLENGRKRLLASARELQKGNEIVLPNHLGTLLYHAKNIHKVDEPKHLDYVDKHKDEFKELLDVVSNFSKKYTLAEGNLEKIKELYAQNNGEDLKELASSFINLLTFTAIGAPATFKFFDKNIDRKRYTSTTEILNATLIHQSITGLYETRIDLSKLGGD

SEQ ID NO: 698 - protein, 1345 aa, Streptococcus mutans; identical to SEQ ID NO: 697

SEQ ID NO: 699 - protein, 1345 aa, Streptococcus mutans
MKKPYSIGLDIGTNSVGWAVVTDDYKVPAKKMKVLGNTDKSHIKKNLLGALLFDSGNTAEDRRLKRTARRRYTRRRNRILYLQEIFSEEMGKVDDSFFHRLDESFLTDDDKNFDSHPIFGNKAEEDAYHQKFPTIYHLRKHLADSTEKADLRLVYLALAHMIKFRGHFLIEGELNAENTDVQKLFADFVGVYDRTFDDSHLSEITVDASSILTEKISKSRRLEKLINNYPKEKKNTLFGNLIALSLGLQPNFKTNFKLSEDAKLQFSKDTYEEELEVLLAQIGDNYAELFLSAKKLYDSILLSGILTVTDVSTKAPLSASMIQRYNEHQMDLAQLKQFIRQKLSDKYNEVFSDVSKDGYAGYIDGKTNQEAFYKYLKGLLNKIEGSGYFLDKIEREDFLRKQRTFDNGSIPHQIHLQEMRAIIRRQAEFYPFLADNQDRIEKILTFRIPYYVGPLARGKSDFAWLSRKSADKITPWNFDEIVDKESSVEAFINRMTNYDLYLPNQKVLPKHSLLYEKFTVYNELTKVKYKTEQGKTAFFDANMKQEIFDGVFKVYRKVTKDKLMDFLEKEFDEFRIVDLTGLDKENKAFNASYGTYHDLRKILDKDFLDNSKNEKILEDIVLTLTLFEDREMIRKRLKNYSDLLTKEQLKKLERRHYTGWGRLSAELIHGIRNKESRKTILDYLIDDGNSNRNFMQLINDDALSFKEEIAKAQVIGETDNLNQVVSDIAGSPAIKKGILQSLKIVDELVKIMGHQPENIVVEMARENQFTNQGRRNSQQRLKGLTDSIKEFGSQILKEHPVENSQLQNDRLFLYYLQNGRDMYTGEELDIDYLSQYDIDHIIPQAFIKDNSIDNRVLTSSKENRGKSDDVPSKDVVRKMKSYWSKLLSAKLITQRKFDNLTKGERGGLTDDDKAGFIKRQLVETRQITKHVARILDERFNTETDENNKKIRQVKIVTLKSNLVSNFRKEFELYKVREINDYHHAHDAYLNAVIGKALLGVYPQLEPEFVYGDYPHFHGHKENKATAKKFFYSNIMNFFKKDDVRTDKNGEIIWKKDEYISNIKKVLSYPQVNIVKKVEEQTGGFSKESILPKGDSDKLIPRKTKKFYWDTKKYGGFDSPIVAYSILVIADIEKGKSKKLKTVKALVGVTIMEKMTFERDPVAFLERKGYRNVQEENIIKLPKYSLFKLENGRKRLLASARELQKGNEIVLPNHLGTLLYHAKNIHKVDEPKHLDYVDKHKDEFKELLDVVSNFSKKYTLAEGNLEKIKELYAQNNGEDLKELASSFINLLTFTAIGAPATFKFFDKNIDRKRYTSTTEILNATLIHQSITGLYETRIDLSKLGGD

SEQ ID NO: 700 - protein, 1345 aa, Streptococcus mutans
MKKPYSIGLDIGTNSVGWAVVTDDYKVPAKKMKVLGNTDKSHIKKNLLGALLFDSGNTAEDRRLKRTARRRYTRRRNRILYLQEIFSEEMGKVDDSFFHRLDESFLTDDDKNFDSYPIFGNKAEEDAYHQKFPTIYHLRKHLADSTEKADLRLVYLALAHMIKFRGHFLIEGELNAENTDVQKLFADFVGVYDRTFDDSHLSEITVDASSILTEKISKSRRLEKLINNYPKEKKNTLFRNLVALSLGLQPNFKTNFKLSEDAKLQFSKDTYEEDLEELLGKIGDDYADLFTLAKNLYDAILLSGILTADDSSTKAPLSASMIKRYAEHHEDLEKLKEFIKANKPELYHDIFKDETKNGYAGYIENGVKQDEFYKYLKNTLSKIAGSDYFLDKIEREDFLRKQRTFDNGSIPHQIHLQEMHAILRRQGDYYPFLKENQDRIEKILTFRIPYYVGPLARGKSDFAWLSRKSADKITPWNFDEIVDKESSVEAFINRMTNYDLYLPNQKVLPKHSLLYEKFTVYNELTKVKYKTEQGKTAFFDANMKQEIFDGVFKVYRKVTKDKLMDFLEKEFDEFRIVDLTGLDKENKAFNASYGTYHDLRKILDKDFLDNSKNEKILEDIVLTLTLFEDREMIRKRLKNYSDLLTKEQLKKLERRHYTGWGRLSAELIHGIRNKESRKTILDYLIDDGNSNRNFMQLINDDALSFKEEIAKAQVIGETDNLNQVVSDIAGSPAIKKGILQSLKIVDELVKIMGHQPENIVVEMARENQFTNQGRRNSQQRLKGLTDSIKEFGSQILKEHPVENSQLQNDRLFLYYLQNGRDMYTGEELDIDYLSQYDIDHIIPQAFIKDNSIDNRVLTSSKENRGKSDDVPSKDVVRKMKSYWSKLLSAKLITQRKFDNLTKGERGGLTDDDKAGFIKRQLVETRQITKHVARILDERFNTETDENNKKIRQVKIVTLKSNLVSNFRKEFELYKVREINDYHHAHDAYLNAVIGKALLGVYPQLEPEFVYGDYPHFHGHKENKATAKKFFYSNIMNFFKKDDVRTDKNGEIIWKKDEYISNIKKVLSYPQVNIVKKVEEQTGGFSKESILPKGDSDKLIPRKTKKFYWDTKKYGGFDSPIVAYSILVIADIEKGKSKKLKTVKALVGVTIMEKMTFERDPVAFLERKGYRNVQEENIIKLPKYSLFKLENGRKRLLASARELQKGNEIVLPNHLGTLLYHAKNIHKVDEPKHLDYVDKHKDEFKELLDVVSNFSKKYTLAEGNLEKIKELYAQNNGEDLKELASSFINLLTFTAIGAPATFKFFDKNIDRKRYTSTTEILNATLIHQSITGLYETRIDLSKLGGD

SEQ ID NO: 701 - protein, 1345 aa, Streptococcus mutans; identical to SEQ ID NO: 700

SEQ ID NO: 702 - protein, 1345 aa, Streptococcus mutans
MKKPYSIGLDIGTNSVGWAVVTDDYKVPAKKMKVLGNTDKSHIKKNLLGALLFDSGNTAEDRRLKRTARRRYTRRRNRILYLQEIFSEEMGKVDDSFFHRLEDSFLVTEDKRGERHPIFGNLEEEVKYHENFPTIYHLRQYLADNPEKTDLRLVYLALAHIIKFGGHFLIEGKFDTRNNDVQRLFQEFLAVYDNTFENSSLQEQNVQVEEILTDKISKSAKKDRVLKLFPNEKSNGRFAEFLKLIVGNQADFKKHFELEEKAPLQFSKDIYEEELEVLLAQIGDNYAELFLSAKKLYDSILLSGILTVTDVSTKAPLSASMIQRYNEHQMDLAQLKQFIRQKLSDKYNEVFSDVSKDGYAGYIDGKTNQEAFYKYLKGLLNKIEGSGYFLDKIEREDFLRKQRTFDNGSIPHQIHLQEMRAIIRRQAEFYPFLADNQDRIEKILTFRIPYYVGPLARGKSDFAWLSRKSADKITPWNFDEIVDKESSVEAFINRMTNYDLYLPNQKVLPKHSLLYEKFTVYNELTKVKYKTEQGKTAFFDANMKQEIFDGVFKVYRKVTKDKLMDFLEKEFDEFRIVDLTGLDKENKAFNASYGTYHDLRKILDKDFLDNSKNEKILEDIVLTLTLFEDREMIRKRLKNYSDLLTKEQLKKLERRHYTGWGRLSAELIHGIRNKESRKTILDYLIDDGNSNRNFMQLINDDALSFKEEIAKAQVIGETDNLNQVVSDIAGSPAIKKGILQSLKIVDELVKIMGHQPENIVVEMARENQFTNQGRRNSQQRLKGLTDSIKEFGSQILKEHPVENSQLQNDRLFLYYLQNGRDMYTGEELDIDYLSQYDIDHIIPQAFIKDNSIDNRVLTSSKENRGKSDDVPSKNVVRKMKSYWSKLLSAKLITQRKFDNLTKAERGGLTDDDKAGFIKRQLVETRQITKHVARILDERFHTETDENNKKIRQVKIVTLKSNLVSNFRKEFELYKVREINDYHHAHDAYLNAVIGKALLGVYPQLEPEFVYGDYPHFHGHKENKATAKKFFYSNIMNFFKKDDVRTDKNGEIIWKKDEHISNIKKVLSYPQVNIVKKVEEQTGGFSKESILPKGNSDKLIPRKTKKFYWDTKKYGGFDSPIVAYSILVIADIEKGKSKKLKTVKALVGVTIMEKMTFERDPVAFLERKGYRNVQEENIIKLPKYSLFKLENGRKRLLASARELQKGNEIVLPNHLGTLLYHAKNIHKVDEPKHLDYVDKHKDEFKELLDVVSNFSKKYTLAEGNLEKIKELYAQNNGEDLKELASSFINLLTFTAIGAPATFKFFDKNIDRKRYTSTTEILNATLIHQSITGLYETRIDLSKLGGD

SEQ ID NO: 703 - protein, 1345 aa, Streptococcus mutans; identical to SEQ ID NO: 702

SEQ ID NO: 704 - protein, 1345 aa, Streptococcus mutans
MKKPYSIGLDIGTNSVGWAVVTDDYKVPAKKMKVLGNTDKSHIKKNLLGALLFDSGNTAEDRRLKRTARRRYTRRRNRILYLQEIFSEEMGKVDDSFFHRLEDSFLVTEDKRGERHPIFGNLEEEVKYHENFPTIYHLRQYLADNPEKTDLRLVYLALAHIIKFRGHFLIEGKFDTRNNDVQRLFQEFLAVYDNTFENSSLQEQNVQVEEILTDKISKSAKKDRVLKLFPNEKSNGRFAEFLKLIVGNQADFKKHFELEEKAPLQFSKDIYEEELEVLLAQIGDNYAELFLSAKKLYDSILLSGILTVTDVSTKAPLSASMIQRYNEHQMDLAQLKQFIRQKLSDKYNEVFSDVSKDGYAGYIDGKTNQEAFYKYLKGLLNKIEGSGYFLDKIEREDFLRKQRTFDNGSIPHQIHLQEMRAIIRRQAEFYPFLADNQDRIEKILTFRIPYYVGPLARGKSDFAWLSRKSADKITPWNFDEIVDKESSVEAFINRMTNYDLYLPNQKVLPKHSLLYEKFTVYNELTKVKYKTEQGKTAFFDANMKQEIFDGVFKVYRKVTKDKLMDFLEKEFDEFRIVDLTGLDKENKAFNASYGTYHDLRKILDKDFLDNSKNEKILEDIVLTLTLFEDREMIRKRLKNYSDLLTKEQLKKLERRHYTGWGRLSAELIHGIRNKESRKTILDYLIDDGNSNRNFMQLINDDALSFKEEIAKAQVIGETDNLNQVVSDIAGSPAIKKGILQSLKIVDELVKIMGHQPENIVVEMARENQFTNQGRRNSQQRLKGLTDSIKEFGSQILKEHPVENSQLQNDRLFLYYLQNGRDMYTGEELDIDYLSQYDIDHIIPQAFIKDNSIDNRVLTSSKENRGKSDDVPSKNVVRKMKSYWSKLLSAKLITQRKFDNLTKAERGGLTDDDKAGFIKRQLVETRQITKHVARILDERFHTETDENNKKIRQVKIVTLKSNLVSNFRKEFELYKVREINDYHHAHDAYLNAVIGKALLGVYPQLEPEFVYGDYPHFHGHKENKATAKKFFYSNIMNFFKKDDVRTDKNGEIIWKKDEHISNIKKVLSYPQVNIVKKVEEQTGGFSKESILPKGNSDKLIPRKTKKFYWDTKKYGGFDSPIVAYSILVIADIEKGKSKKLKTVKALVGVTIMEKMTFERDPVAFLERKGYRNVQEENIIKLPKYSLFKLENGRKRLLASARELQKGNEIVLPNHLGTLLYHAKNIHKVDEPKHLDYVDKHKDEFKELLDVVSNFSKKYTLAEGNLEKIKELYAQNNGEDLKELASSFINLLTFTAIGAPATFKFFDKNIDRKRYTSTTEILNATLIHQSITGLYETRIDLSKLGGD

SEQ ID NO: 705 - protein, 1345 aa, Streptococcus mutans
MKKPYSIGLDIGTNSVGWAVVTDDYKVPAKKMKVLGNTDKSHIKKNLLGALLFDSGNTAEDRRLKRTARRRYTRRRNRILYLQEIFSEEMGKVDDSFFHRLEDSFLVTEDKRGERHPIFGNLEEEVKYHENFPTIYHLRQYLADNPEKTDLRLVYLALAHIIKFRGHFLIEGKFDTRNNDVQRLFQEFLAVYDNTFENSSLQEQNVQVEEILTDKISKSAKKDRVLKLFPNEKSNGRFAEFLKLIVGNQADFKKHFELEEKAPLQFSKDIYEEELEVLLAQIGDNYAELFLSAKKLYDSILLSGILTVTDVSTKAPLSASMIQRYNEHQMDLAQLKQFIRQKLSDKYNEVFSDVSKDGYAGYIDGKTNQEAFYKYLKGLLNKIEGSGYFLDKIEREDFLRKQRTFDNGSIPHQIHLQEMRAIIRRQAEFYPFLADNQDRIEKILTFRIPYYVGPLARGKSDFAWLSRKSADKITPWNFDEIVDKESSVEAFINRMTNYDLYLPNQKVLPKHSLLYEKFTVYNELTKVKYKTEQGKTAFFDANMKQEIFDGVFKVYRKVTKDKLMDFLEKEFDEFRIVDLTGLDKENKAFNASYGTYHDLRKILDKDFLDNSKNEKILEDIVLTLTLFEDREMIRKRLKNYSDLLTKEQLKKLERRHYTGWGRLSAELIHGIRNKESRKTILDYLIDDGNSNRNFMQLINDDALSFKEEIAKAQVIGETDNLNQVVSDIAGSPAIKKGILQSLKIVDELVKIMGHQPENIVVEMARENQFTNQGRRNSQQRLKGLTDSIKEFGSQILKEHPVENSQLQNDRLFLYYLQNGRDMYTGEELDIDYLSQYDIDHIIPQAFIKDNSIDNRVLTSSKENRGKSDDVPSKDVVRKMKSYWSKLLSAKLITQRKFDNLTKAERGGLTDDDKAGFIKRQLVETRQITKHVARILDERFNTETDENNKKIRQVKIVTLKSNLVSNFRKEFELYKVREINDYHHAHDAYLNAVIGKALLGVYPQLEPEFVYGDYPHFHGHKENKATAKKFFYSNIMNFFKKDDVRTDKNGEIIWKKDEHISNIKKVLSYPQVNIVKKVEEQTGGFSKESILPKGNSYKLIPRKTKKFYWDTKKYGGFDSPIVAYSILVIADIEKGKSKKLKTVKALVGVTIMEKMTFERDPVAFLERKGYRNVQEENIIKLPKYSLFKLENGRKRLLASARELQKGNEIVLPNHLGTLLYHAKNIHKVDEPKHLDYVDKHKDEFKELLDVVSNFSKKYTLAEGNLEKIKELYAQNNGEDLKELASSFINLLTFTAIGAPAAFKFFDKNIDRKRYTSTTEILNATLIHQSITGLYETRIDLSKLGGD

SEQ ID NO: 706 - protein, 1345 aa, Streptococcus mutans
MKKPYSIGLDIGTNSVGWAVVTDDYKVPAKKMKVLGNTDKSHIKKNLLGALLFDSGNTAEDRRLKRTARRRYTRRRNRILYLQEIFSEEMGKVDDSFFHRLEDSFLVTEDKRGERHPIFGNLEEEVKYHENFPTIYHLRQYLADNPEKTDLRLVYLALAHIIKFRGHFLIEGKFDTRNNDVQRLFQEFLAVYDNTFENSSLQEQNVQVEEILTDKISKSAKKDRVLKLFPNEKSNGRFAEFLKLIVGNQADFKKHFELEEKAPLQFSKDIYEEELEVLLAQIGDNYAELFLSAKKLYDSILLSGILTVTDVSTKAPLSASMIQRYNEHQMDLAQLKQFIRQKLSDKYNEVFSDVSKDGYAGYIDGKTNQEAFYKYLKGLLNKIEGSGYFLDKIEREDFLRKQRTFDNGSIPHQIHLQEMRAIIRRQAEFYPFLADNQDRIEKILTFRIPYYVGPLARGKSDFAWLSRKSADKITPWNFDEIVDKESSAEAFINRMTNYDLYLPNQKVLPKHSLLYEKFTVYNELTKVKYKTEQGKTAFFDANMKQEIFDGVFKVYRKVTKDKLMDFLEKEFDEFRIVDLTGLDKENKAFNASYGTYHDLRKILDKDFLDNSKNEKILEDIVLTLTLFEDREMIRKRLKNYSDLLTKEQLKKLERRHYTGWGRLSAELIHGIRNKESRKTILDYLIDDGNSNRNFMQLINDDALSFKEEIAKAQVIGETDNLNQVVSDIAGSLAIKKGILQSLKIVDELVKIMGHQPENIVVEMARENQFTNQGRRNSQQRLKGLTDSIKEFGSQILKEHPVENSQLQNDRLFLYYLQNGRDMYTGEELDIDYLSQYDIDHIIPQAFIKDNSIDNRVLTSSKENRGKSDDVPSKDVVRKMKSYWSKLLSAKLITQRKFDNLTKGERGGLTDDDKAGFIKRQLVETRQITKHVARILDERFNTETDENNKKIRQVKIVTLKSNLVSNFRKEFELYKVREINDYHHAHDAYLNAVIGKALLGVYPQLEPEFVYGDYPHFHGHKENKATAKKFFYSNIMNFFKKDDVRTDKNGEIIWKKDEYISNIKKVLSYPQVNIVKKVEEQTGGFFKESILPKGDSDKLIPRKTKKFYWDTKKYGGFDSPIVAYSILVIADIEKGKSKKLKTVKALVGVTIMEKMTFERDPVAFLERKGYRNVQEENIIKLPKYSLFKLENGRKRLLASARELQKGNEIVLPNHLGTLLYHAKNIHKVDEPKHLDYVDKHKDEFKELLDVVSNFSKKYTLAEGNLEKIKELYAQNNGEDLKELASSFINLLTFTAIGAPATFKFFDKNIDRKRYTSTTEILNATLIHQSITGLYETRIDLSKLGGD

SEQ ID NO: 707 - protein, 1345 aa, Streptococcus mutans
MKKPYSIGLDIGTNSVGWAVVTDDYKVPAKKMKVLGNTDKSHIKKNLLGALLFDSGNTAEDRRLKRTARRRYTRRRNRILYLQEIFSEEMGKVDDSFFHRLEDSFLVTEDKRGERHPIFGNLEEEVKYHENFPTIYHLRQYLADNPEKTDLRLVYLALAHIIKFRGHFLIEGKFDTRNNDVQRLFQEFLAVYDNTFENSSLQEQNVQVEEILTDKISKSAKKDRVLKLFPNEKSNGRFAEFLKLIVGNQADFKKHFELEEKAPLQFSKDIYEEELEVLLAQIGDNYAELFLSAKKLYDSILLSGILTVTDVSTKAPLSASMIQRYNEHQMDLAQLKQFIRQKLSDKYNEVFSDVSKDGYAGYIDGKTNQEAFYKYLKGLLNKIEGSGYFLDKIEREDFLRKQRTFDNGSIPHQIHLQEMRAIIRRQAEFYPFLADNQDRIEKILTFRIPYYVGPLARGKSDFAWLSRKSADKITPWNFDEIVDKESSVEAFINRMTNYDLYLPNQKVLPKHSLLYEKFTVYNELTKVKYKTEQGKTAFFDANMKQEIFDGVFKVYRKVTKDKLMDFLEKEFDEFRIVDLTGLDKENKAFNASYGTYHDLRKILDKDFLDNSKNEKILEDIVLTLTLFEDREMIRKRLKNYSDLLTKEQLKKLERRHYTGWGRLSAELIHGIRNKESRKTILDYLIDDGNSNRNFMQLINDDALSFKEEIAKAQVIGETDNLNQVVSDIAGSPAIKKGILQSLKIVDELVKIMGHQPENIVVEMARENQFTNQGRRNSQQRLKGLTDSIKEFGSQILKEHPVENSQLQNDRLFLYYLQNGRDMYTGEELDIDYLSQYDIDHIIPQAFIKDNSIDNRVLTSSKENRGKSDDVPSKDVVRKMKSYWSKLLSAKLITQRKFDNLTKAERGGLTDDDKAGFIKRQLVETRQITKHVARILDERFNTETDENNKKIRQVKIVTLKSNLVSNFRKEFELYKVREINDYHHAHDAYLNAVIGKALLGVYPQLEPEFVYGDYPHFHGHKENKATAKKFFYSNIMNFFKKDDVRTDKNGEIIWKKDEHISNIKKVLSYPQVNIVKKVEEQTGGFSKESILPKGNSDKLIPRKTKKFYWDTKKYGGFDSPIVAYSILVIADIEKGKSKKLKTVKALVGVTIMEKMTFERDPVAFLERKGYRNVQEENIIKLPKYSLFKLENGRKRLLASARELQKGNEIVLPNHLGTLLYHAKNIHKVDEPKHLDYVDKHKDEFKELLDVVSNFSKKYTLAEGNLEKIKELYAQNNGEDLKELASSFINLLTFTAIGAPATFKFFDKNIDRKRYTSTTEILNATLIHQSITGLYETRIDLNKLGGD

SEQ ID NO: 708 - protein, 1345 aa, Streptococcus mutans; identical to SEQ ID NO: 707

SEQ ID NO: 709 - protein, 1345 aa, Streptococcus mutans; identical to SEQ ID NO: 704

SEQ ID NO: 710 - protein, 1345 aa, Streptococcus mutans; identical to SEQ ID NO: 705

SEQ ID NO: 711 - protein, 1345 aa, Streptococcus mutans; identical to SEQ ID NO: 706

SEQ ID NO: 712 - protein, 1345 aa, Streptococcus mutans
MKKPYSIGLDIGTNSVGWAVVTDDYKVPAKKMKVLGNTDKSHIKKNLLGALLFDSGNTAEDRRLKRTARRRYTRRRNRILYLQEIFSEEMGKVDDSFFHRLEDSFLVTEDKRGERHPIFGNLEEEVKYHENFPTIYHLRQYLADNPEKVDLRLVYLALAHIIKFRGHFLIEGKFDTRNNDVQKLFQEFLAVYDNTFENSSLQEQNVQVEEILTDKISKSAKKDRVLKLFPNEKSNGRFAEFLKLIVGNQADFKKHFELEEKAPLQLSKDTYEEELEVLLAQIGDNYAELFLSAKKLYDSILLSGILTVTDVSTKAPLSASMIQRYNEHQMDLAQLKQFIRQKLSDKYNEVFSDVSKDGYAGYIDGKTNQEAFYKYLKGLLNKIEGSGYFLDKIEREDFLRKQRTFDNGSIPHQIHLQEMRAIIRRQAEFYPFLADNQDRIEKILTFRIPYYVGPLARGKSDFAWLSRKSADKITPWNFDEIVDKESSVEAFINRMTNYDLYLPNQKVLPKHSLLYEKFTVYNELTKVKYKTEQGKTAFFDANMKQEIFDGVFKVYRKVTKDKLMDFLEKEFDEFRIVDLTGLDKENKAFNASYGTYHDLRKILDKDFLDNSKNEKILEDIVLTLTLFEDREMIRKRLENYSDLLTKEQVKKLERRHYTGWGRLSAELIHGIRNKESRKTLLDYLIDDGNSNRNFMQLINDDALSFKEEIAKAQVIGETDNLNQVVSDIAGSPAIKKGILQSLKIVDELVKIMGHQPENIVVEMARENQFTNQGRRNSQQRLKGLTDSIKEFGSQILKEHPVENSQLQNDRLFLYYLQNGRDMYTGEELDIDYLSQYDIDHIIPQAFIKDNSIDNRVLTSSKENRGKSDDVPSKDVVRKMKSYWSKLLSAKLITQRKFDNLTKAERGGLTDDDKAGFIKRQLVETRQITKHVARILDERFNTETDENNKKIRQVKIVTLKSNLVSNFRKEFELYKVREINDYHHAHDAYLNAVIGKALLGVYPQLEPEFVYGDYPHFHGHKENKATAKKFFYSNIMNFFKKDDVRTDKNGEIIWKKDEYISNIKKVLSYPQVNIVKKVEEQTGGFSKESILPKGNSDKLIPRKTKKFYWDTKKYGGFDSPIVAYSILVIADIEKGKSKKLKTVKALVGVTIMEKMTFERDPIAFLERKGYRNVQEENIIKLPKYSLFKLENGRKRLLASARELQKGNEIVLPNHLGTLLYHAKNIHKVDEPKHLDYVDKHKDEFKELLDVVSNFSKKYTLAEGNLEKIKELYAQNNGEDLKELASSFINLLTFTAIGAPATFKFFDKNIDRKRYTSTTEILNATLIHQSITGLYETRIDLSKLGGD

SEQ ID NO: 713 - protein, 1345 aa, Streptococcus mutans; identical to SEQ ID NO: 712

SEQ ID NO: 714 - protein, 1345 aa, Streptococcus mutans
MKKPYSIGLDIGTNSVGWAVVTDDYKVPAKKMKVLGNTDKSHIKKNLLGALLFDSGNTAEDRRLKRTARRRYTRRRNRILYLQEIFSEEMGKVDDSFFHRLEDSFLVTEDKRGERHPIFGNLEEEVKYHENFPTIYHLRQYLADNPEKVDLRLVYLALAHIIKFRGHFLIEGKFDTRNNDVQRLFQEFLAVYDNTFENSSLQEQNVQVEEILTDKISKSAKKDRVLKLFPNEKSNGRFAEFLKLIVGNQADFKKHFELEEKAPLQFSKDTYEEDLEELLGKIGDDYADLFTLAKNLYDAILLSGILTADDSSTKAPLSASMIQRYNEHQMDLAQLKQFIRQKLSDKYNEVFSDVSKDGYAGYIDGKTNQEAFYKYLKGLLNKIEGSGYFLDKIEREDFLRKQRTFDNGSIPHQIHLQEMRAIIRRQAEFYPFLADNQDRIEKILTFRIPYYVGPLARGKSDFAWLSRKSADKITPWNFDEIVDKESSAEAFINRMTNYDLYLPNQKVLPKHSLLYEKFTVYNELTKVKYKTEQGKTAFFDANMKQEIFDGVFKVYRKVTKDKLMDFLEKEFDEFRIVDLTGLDKENKVFNASYGTYHDLCKILDKDFLDNSKNEKILEDIVLTLTLFEDREMIRKRLENYSDLLTKEQVKKLERRHYTGWGRLSAELIHGIRNKESRKTILDYLIDDGNSNRNFMQLINDDALSFKEEIAKAQVIGETDNLNQVVSDIAGSPAIKKGILQSLKIVDELVKIMGHQPENIVVEMARENQFTNQGRRNSQQRLKGLTDSIKEFGSQILKEHPVENSQLQNDRLFLYYLQNGRDMYTGEELDIDYLSQYDIDHIIPQAFIKDNSIDNRVLTSSKENRGKSDDVPSKDVVRKMKSYWSKLLSAKLITQRKFDNLTKAERGGLTDDDKAGFIKRQLVETRQITKHVARILDERFYTETDENNKKIRQVKIVTLKSNLVSNFRKEFELYKVREINDYHHAHDAYLNAVIGKALLGVYPQLEPEFVYGDYPHFHGHKENKATAKKFFYSNIMNFFKKDDVRTDKNGEIIWKKDEHISNIKKVLSYPQVNIVKKVEEQTGGFSKESILPKGNSDKLIPRKTKKFYWDTKKYGGFDSPIVAYSILVIADIEKGKSKKLKTVKALVGVTIMEKMTFERDPVAFLERKGYRNVQEENIIKLPKYSLFKLENGRKRLLASARELQKGNEIVLPNHLGTLLYHAKNIHKVDEPKHLDYVDKHKDEFKELLDVVSNFSKKYTLAEGNLEKIKELYAQNNGEDLKELASSFINLLTFTAIGAPATFKFFDKNIDRKRYTSTTEILNATLIHQSITGLYETRIDLSKLGGD

SEQ ID NO: 715 - protein, 1345 aa, Streptococcus mutans
MKKPYSIGLDIGTNSVGWAVVTDDYKVPAKKMKVLGNTDKSHIKKNLLGALLFDSGNTAEDRRLKRTARRRYTRRRNRILYLQEIFSEEMGKVDDSFFHRLEDSFLVTEDKRGERHPIFGNLEEEVKYHENFPTIYHLRQYLADNPEKVDLRLVYLALAHIIKFRGHFLIEGKFDTRNNDVQRLFQEFLAVYDNTFENSSLQEQNVQVEEILTDKISKSAKKDRVLKLFPNEKSNGRFAEFLKLIVGNQADFKKHFELEEKAPLQFSKDTYEEDLEELLGKIGDDYADLFTLAKNLYDAILLSGILTADDSSTKAPLSASMIQRYNEHQMDLAQLKQFIRQKLSDKYNEVFSDVSKDGYAGYIDGKTNQEAFYKYLKGLLNKIEGSGYFLDKIEREDFLRKQRTFDNGSIPHQIHLQEMRAIIRRQAEFYPFLADNQDRIEKILTFRIPYYVGPLARGKSDFAWLSRKSADKITPWNFDEIVDKESSAEAFINRMTNYDLYLPNQKVLPKHSLLYEKFTVYNELTKVKYKTEQGKTAFFDANMKQEIFDGVFKVYRKVTKDKLMDFLEKEFDEFRIVDLTGLDKENKVFNASYGTYHDLCKILDKDFLDNSKNEKILEDIVLTLTLFEDREMIRKRLENYSDLLTKEQVKKLERRHYTGWGRLSAELIHGIRNKESRKTILDYLIDDGNSNRNFMQLINDDALSFKEEIAKAQVIGETDNLNQVVSDIAGSPAIKKGILQSLKIVDELVKIMGHQPENIVVEMARENQFTNQGRRNSQQRLKGLTDSIKEFGSQILKEHPVENSQLQNDRLFLYYLQNGRDMYTGEELDIDYLSQYDIDHIIPQAFIKDNSIDNRVLTSSKENRGKSDDVPSKDVVRKMKPYWSKLLSAKLITQRKFDNLTKAERGGLTDDDKAGFIKRQLVETRQITKHVARILDERFNTETDENNKKIRQVKIVTLKSNLVSNFRKEFELYKVREINDYHHAHDAYLNAVIGKALLGVYPQLEPEFVYGDYPHFHGHEENKATAKKFFYSNIMNFFKKDDVRTDKNGEIIWKKDEHISNIKKVLSYPQVNIVKKVEEQTGGFSKESILPKGNSDKLIPRKTKKFYWDTKKYGGFDSPIVAYSILVIADIEKGKSKKLKTVKALVGVTIMEKMTFERDPVAFLERKGYRNVQEENIIKLPKYSLFKLENGRKRLLASARELQKGNEIVLPNHLGTLLYHAKNIHKVDEPKHLDYVDKHKDEFKELLDVVSNFSKKYTLAEGNLEKIKELYAQNNGEDLKELASSFINLLTFTAIGAPATFKFFDKNIDRKRYTSTTEILNATLIHQSITGLYETRIDLSKLGGD

SEQ ID NO: 716 - protein, 1345 aa, Streptococcus mutans
MKKPYSIGLDIGTNSVGWAVVTDDYKVPAKKMKVLGNTDKSHIKKNLLGALLFDSGNTAEDRRLKRTARRRYTRRRNRILYLQEIFSEEMGKVDDSFFHRLEDSFLVTEDKRGERHPIFGNLEEEVKYHENFPTIYHLRQYLADNPEKVDLRLVYLALAHIIKFRGHFLIEGKFDTRNNDVQRLFQEFLAVYDNTFENSSLQEQNVQVEEILTDKISKSAKKDRVLKLFPNEKSNGRFAEFLKLIVGNQADFKKHFELEEKAPLQFSKDTYEEELEVLLAQIGDNYAELFLSAKKLYDSILLSGILTVTDVSTKAPLSASMIQRYNEHQMDLAQLKQFIRQKLSDKYNEVFSDVSKDGYAGYIDGKTNQEAFYKYLKGLLNKIEGSGYFLDKIEREDFLRKQRTFDNGSIPHQIHLQEMRAIIRRQAEFYPFLADNQDRIEKILTFRIPYYVGPLARGKSDFAWLSRKSADKITPWNFDEIVDKESSAEAFINRMTNYDLYLPNQKVLPKHSLLYEKFTVYNELTKVKYKTEQGKTAFFDANMKQEIFDGVFKVYRKVTKDKLMDFLEKEFDEFRIVDLTGLDKENKVFNASYGTYHDLCKILDKDFLDNSKNEKILEDIVLTLTLFEDREMIRKRLENYSDLLTKEQVKKLERRHYTGWGRLSAELIHGIRNKESRKTILDYLIDDGNSNRNFMQLINDDALSFKEEIAKAQVIGETDNLNQVVSDIAGSPAIKKGILQSLKIVDELVKIMGHQPENIVVEMARENQFTKQGRRNSQQRLKGLTDSIKEFGSQILKEHPVENSQLQNDRLFLYYLQNGRDMYTGEELDIDYLSQYDIDHIIPQAFIKDNSIDNRVLTSSKENRGKSDDVPSKDVVRKMKSYWSKLLSAKLITQRKFDNLTKAERGGLTDDDKAGFIKRQLVETRQITKHVARILDERFYTETDENNKKIRQVKIVTLKSNLVSNFRKEFELYKVREINDYHHAHDAYLNAVIGKALLGVYPQLEPEFVYGDYPHFHGHKENKATAKKFFYSNIMNFFKKDDVRTDKNGEIIWKKDEHISNIKKVLSYPQVNIVKKVEEQTGGFSKESILPKGNSDKLIPRKTKKFYWDTKKYGGFDSPIVAYSILVIADIEKGKSKKLKTVKALVGVTIMEKMTFERDPVAFLERKGYRNVQEENIIKLPKYSLFKLENGRKRLLASARELQKGNEIVLPNHLGTLLYHAKNIHKVDEPKHLDYVDKHKDEFKELLDVVSNFSKKYTLAEGNLEKIKELYAQNNGEDLKELASSFINLLTFTAIGAPATFKFFDKNIDRKRYTSTTEILNATLIHQSITGLYETRIDLSKLGGD

SEQ ID NO: 717 - protein, 1345 aa, Streptococcus mutans
MKKPYSIGLDIGTNSVGWAVVTDDYKVPAKKMKVLGNTDKSHIKKNLLGALLFDSGNTAEDRRLKRTARRRYTRRRNRILYLQEIFSEEMGKVDDSFFHRLEDSFLVTEDKRGERHPIFGNLEEEVKYHENFPTIYHLRQYLADNPEKVDLRLVYLALAHIIKFRGHFLIEGKFDTRNNDVQRLFQEFLAVYDNTFENSSLQEQNVQVEEILTDKISKSAKKDRVLKLFPNEKSNGRFAEFLKLIVGNQADFKKHFELEEKAPLQFSKDTYEEELEVLLAQIGDNYAELFLSAKKLYDSILLSGILTVTDVSTKAPLSASMIQRYNEHQMDLAQLKQFIRQKLSDKYNEVFSDVSKDGYAGYIDGKTNQEAFYKYLKGLLNKIEGSGYFLDKIEREDFLRKQRTFDNGSIPHQIHLQEMRAIIRRQAEFYPFLADNQDRIEKILTFRIPYYVGPLARGKSDFAWLSRKSADKITPWNFDEIVDKESSAEAFINRMTNYDLYLPNQKVLPKHSLLYEKFTVYNELTKVKYKTEQGKTAFFDANMKQEIFDGVFKVYRKVTKDKLMDFLEKEFDEFRIVDLTGLDKENKVFNASYGTYHDLCKILDKDFLDNSKNEKILEDIVLTLTLFEDREMIRKRLENYSDLLTKEQVKKLERRHYTGWGRLSAELIHGIRNKESRKTILDYLIDDGNSNRNFMQLINDDALSFKEEIAKAQVIGETDNLNQVVSDIAGSPAIKKGILQSLKIVDELVKIMGHQPENIVVEMARENQFTKQGRRNSQQRLKGLTDSIKEFGSQILKEHPVENSQLQNDRLFLYYLQNGRDMYTGEELDIDYLSQYDIDHIIPQAFIKDNSIDNRVLTSSKENRGKSDDVPSKDVVRKMKSYWSKLLSAKLITQRKFDNLTKAERGGLTDDDKAGFIKRQLVETRQITKHVARILDERFYTETDENNKKIRQVKIVTLKSNLVSNFRKEFELYKVREINDYHHAHDAYLNAVIGKALLGVYPQLEPEFVYGDYPHFHGHKENKATAKKFFYSNIMNFFKKDDVRTDRNGEIIWKKDEHISNIKKVLSYPQVNIVKKVEEQTGGFSKESILPKGNSDKLIPRKTKKFYWDTKKYGGFDSPIVAYSILVIADIEKGKSKKLKTVKALVGVTIMEKMTFERDPVAFLERKGYRNVQEENIIKLPKYSLFKLENGRKRLLASARELQKGNEIVLPNHLGTLLYHAKNIHKVDEPKHLDYVDKHKDEFKELLDVVSNFSKKYTLAEGNLEKIKELYAQNNGEDLKELASSFINLLTFTAIGAPATFKFFDKNIDRKRYTSTTEILNATLIHQSITGLYETRIDLSKLGGD

SEQ ID NO: 718 - protein, 1345 aa, Streptococcus mutans
MKKPYSIGLDIGTNSVGWAVVTDDYKVPAKKMKVLGNTDKSHIKKNLLGALLFDSGNTAEDRRLKRTARRRYTRRRNRILYLQEIFSEEMGKVDDSFFHRLEDSFLVTEDKRGERHPIFGNLEEEVKYHENFPTIYHLRQYLADNPEKVDLRLVYLALAHIIKFRGHFLIEGKFDTRNNDVQRLFQEFLAVYDNTFENSSLQEQNVQVEEILTDKISKSAKKDRVLKLFPNEKSNGRFAEFLKLIVGNQADFKKHFELEEKAPLQFSKDTYEEELEVLLAQIGDNYAELFLSAKKLYDSILLSGILTVTDVSTKAPLSASMIQRYNEHQMDLAQLKQFIRQKLSDKYNEVFSDVSKDGYAGYIDGKTNQEAFYKYLKGLLNKIEGSGYFLDKIEREDFLRKQRTFDNGSIPHQIHLQEMRAIIRRQAEFYPFLADNQDRIEKILTFRIPYYVGPLARGKSDFAWLSRKSADKITPWNFDEIVDKESSAEAFINRMTNYDLYLPNQKVLPKHSLLYEKFTVYNELTKVKYKTEQGKTAFFDANMKQEIFDGVFKVYRKVTKDKLMDFLEKEFDEFRIVDLTGLDKENKVFNASYGTYHDLCKILDKDFLDNSKNEKILEDIVLTLTLFEDREMIRKRLENYSDLLTKEQVKKLERRHYTGWGRLSAELIHGIRNKESRKTILDYLIDDGNSNRNFMQLINDDALSFKEEIAKAQVIGETDNLNQVVSDIAGSPAIKKGILQSLKIVDELVKIMGHQPENIVVEMARENQFTNQGRQNSQQRLKGLTDSIKEFGSQILKEHPVENSQLQNDRLFLYYLQNGRDMYTGEELDIDYLSQYDIDHIIPQAFIKDNSIDNRVLTSSKENRGKSDDVPSEDVVRKMKSYWSKLLSAKLITQRKFDNLTKAERGGLTDDDKAGFIKRQLVETRQITKHVARILDERFYTETDENNKKIRQVKIVTLKSNLVSNFRKEFELYKVREINDYHHAHDAYLNAVIGKALLGVYPQLEPEFVYGDYPHFHGHKENKATAKKFFYSNIMNFFKKDDVRTDKNGEIIWKKDEHISNIKKVLSYPQVNIVKKVEEQTGGFSKESILPKGNSDKLIPRKTKKFYWDTKKYGGFDSPIVAYSILVIADIEKGKSKKLKTVKALVGVTIMEKMTFERDPVAFLERKGYRNVQEENIIKLPKYSLFKLENGRKRLLASARELQKGNEIVLPNHLGTLLYHAKNIHKVDEPKHLDYVDKHKDEFKELLDVVSNFSKKYTLAEGNLEKIKELYAQNNGEDLKELASSFINLLTFTAIGAPATFKFFDKNIDRKRYTSTTEILNATLIHQSITGLYETRIDLSKLGGD

SEQ ID NO: 719 - protein, 1345 aa, Streptococcus mutans; identical to SEQ ID NO: 718

SEQ ID NO: 720 - protein, 1345 aa, Streptococcus mutans; identical to SEQ ID NO: 714

SEQ ID NO: 721 - protein, 1345 aa, Streptococcus mutans; identical to SEQ ID NO: 715

SEQ ID NO: 722 - protein, 1345 aa, Streptococcus mutans; identical to SEQ ID NO: 716

SEQ ID NO: 723 - protein, 1345 aa, Streptococcus mutans; identical to SEQ ID NO: 717

SEQ ID NO: 724 - protein, 1345 aa, Streptococcus mutans; identical to SEQ ID NO: 716

SEQ ID NO: 725 - protein, 1345 aa, Streptococcus mutans; identical to SEQ ID NO: 716

SEQ ID NO: 726 - protein, 1345 aa, Streptococcus mutans; identical to SEQ ID NO: 716

SEQ ID NO: 727 - protein, 1345 aa, Streptococcus mutans; identical to SEQ ID NO: 717

SEQ ID NO: 728 - protein, 1345 aa, Streptococcus mutans
MKKPYSIGLDIGTNSVGWAVVTDDYKVPAKKMKVLGNTDKSHIKKNLLGALLFDSGNTAEDRRLKRTARRRYTRRRNRILYLQEIFSEEMGKVNDSFFHRLEDSFLVTEDKRGERHPIFGNLEEEVKYHENFPTIYHLRQYLADNPEKVDLRLVYLALAHIIKFRGHFLIEGKFDTRNNDVQRLFQEFLAVYDNTFENSSLQEQNVQVEEILTDKISKSAKKDRVLKLFPNEKSNGRFAEFLKLIVGNQADFKKHFELEEKAPLQFSKDTYEEELEVLLAQIGDNYAELFLSAKKLYDSILLSGILTVTDVSTKAPLSASMIQRYNEHQMDLAQLKQFIRQKLSDKYNEVFSDVSKDGYAGYIDGKTNQEAFYKYLKGLLNKIEGSGYFLDKIEREDFLRKQRTFDNGSIPHQIHLQEMRAIIRRQAEFYPFLADNQDRIEKILTFRIPYYVGPLARGKSDFAWLSRKSADKITPWNFDEIVDKESSAEAFINRMTNYDLYLPNQKVLPKHSLLYEKFTVYNELTKVKYKTEQGKTAFFDANMKQEIFDGVFKVYRKVTKDKLMDFLEKEFDEFRIVDLTGLDKENKVFNASYGTYHDLCKILDKDFLDNSKNEKILEDIVLTLTLFEDREMIRKRLENYSDLLTKEQVKKLERRHYTGWGRLSAELIHGIRNKESRKTILDYLIDDGNSNRNFMQLINDDALSFKEEIAKAQVIGETDNLNQVVSDIAGSPAIKKGILQSLKIVDELVKIMGHQPENIVVEMARENQFTKQGRRNSQQRLKGLTDSIKEFGSQILKEHPVENSQLQNDRLFLYYLQNGRDMYTGEELDIDYLSQYDIDHIIPQAFIKDNSIDNRVLTSSKENRGKSDDVPSKDVVRKMKSYWSKLLSAKLITQRKFDNLTKAERGGLTDDDKAGFIKRQLVETRQITKHVARILDERFYTETDENNKKIRQVKIVTLKSNLVSNFRKEFELYKVREINDYHHAHDAYLNAVIGKALLGVYPQLEPEFVYGDYPHFHGHKENKATAKKFFYSNIMNFFKKDDVRTDKNGEIIWKKDEYISNIKKVLSYPQVNIVKKVEEQTGGFSKESILPKGNSDKLIPRKTKKFYWDTKKYGGFDSPIVAYSILVIADIEKGKSKKLKTVKALVGVTIMEKMTFERDPIAFLERKGYRNVQEENIIKLPKYSLFKLENGRKRLLASARELQKGNEIVLPNHLGTLLYHAKNIHKVDEPKHLDYVDKHKDEFKELLDVVSNFSKKYTLAEGNLEKIKELYAQNNGEDLKELASSFINLLTFTAIGAPAAFKFFDKNIDRKRYTSTTEILNATLIHQSITGLYETRIDLSKLGGD

SEQ ID NO: 729 - protein, 1345 aa, Streptococcus mutans; identical to SEQ ID NO: 728

SEQ ID NO: 730 - protein, 1345 aa, Streptococcus mutans
MKKPYSIGLDIGTNSVGWAVVTDDYKVPAKKMKVLGNTDKSHIKKNLLGALLFDSGNTAEDRRLKRTTRRRYTRRRNRILYLQEIFSEEMGKVDDSFFHRLEDSFLVTEDKRGERHPIFGNLEEEVKYHENFPTIYHLRQYLADNPEKTDLRLVYLALAHIIKFRGHFLIEGKFDTRNNDVQRLFQEFLAVYDNTFENSSLQEQNVQVEEILTDKISKSAKKDRVLKLFPNEKSNGCFAEFLKLIVGNQADFKKHFELEEKAPLQFSKDTYEEELEVLLAQIGDNYAELFLSAKKLYDSILLSGILTVTDVSTKAPLSASMIQRYNEHQMDLTQLKQFIRQKLSDKYNEVFSDVSKDGYAGYIDGKTNQEAFYKYLKGLLNKIEGSGYFLDKIEREDFLRKQRTFDNGSIPHQIHLQEMRAIIRRQAEFYPFLADNQDRIEKLLTFRIPYYVGPLASGKSDFAWLSRKSADKITPWNFDEIVDKESSAEAFINRMTNYDLYLPNQKVLPKHSLLYEKFTVYNELTKVKYKTEQGKTAFFDANMKQEIFDGVFKVYRKVTKDKLMDFLEKEFDEFRIVDLTGLDKENKVFNASYGTYHDLCKILDKDFLDNSKNEKILEDIVLTLTLFEDREMIRKRLENYSDLLTKEQVKKLERRHYTGWGRLSAELIHGIRNKESRKTILDYLIDDGNSNRNFMQLINDDALSFKEEIAKAQVIGETDNLNQVVSDIAGSPAIKKGILQSLKIVDELVKIMGHQPENIVVEMARENQFTNQGRRNSQQRLKGLTDSIKEFGSQILKEHPVENSQLQNDRLFLYYLQNGRDMYTGEELDIDYLSQYDIDHIIPQAFIKDNSIDNRVLTSSKENRGKSDDVPSKDVVRKMKSYWSKLLSAKLITQRKFDNLTKAERGGLTDDDKAGFIKRQLVETRQITKHVARILDERFNTETDENNKKIRQVKIVTLKSNLVSNFRKEFELYKVREINDYHHAHDAYLNAVIGKALLGVYPQLEPEFVYGDYPHFHGHKENKATAKKFFYSNIMNFFKKDDVRTDKNGEIIWKKDEHISNIKKVLSYPQVNIVKKVEEQTGGFSKESILPKGNSDKLIPRKTKKFYWDTKKYGGFDSPIVAYSILVIADIEKGKSKKLKTVKALVGVTIMEKMTFERDPVAFLERKGYRNVQEENIIKLPKYSLFKLENGRKRLLASARELQKGNEIVLPNHLGTLLYHAKNIHKVDEPKHLDYVDKHKDEFKELLDVVSNFSKKYTLAEGNLEKIKELYAQNNGEDLKELASSFINLLTFTAIGAPATFKFFDKNIDRKRYTSTTEILNATLIHQSITGLYETRIDLSKLGGD

SEQ ID NO: 731 - protein, 1345 aa, Streptococcus mutans; identical to SEQ ID NO: 730

SEQ ID NO: 732 - protein, 1350 aa, Streptococcus mutans
MKKPYSIGLDIGTNSVGWAVVTDDYKVPAKKMTVLGNTDKSHIKKNLLGALLFDSGNTAADRRLKRTARRRYTRRRNRILYLQEIFAEEMSKVDDSFFHRLEDSFLVTEDKRGERHPIFGNLEEEVKYHENFPTIYHLRQYLADNPEKVDLRLVYLALAHIIKFRGHFLIEGKFDTRNNDVQRLFQEFLAVYDNTFENSSLQEQNVQVEEILTDKISKSAKKDRVLKLFPNEKSNGRFAEFLKLIVGNQADFKKHFELEEKTPLQFSKDTYEEELEVLLAQIGDNYAELFLSAKKLYDSILLSGILTVTDVSTKAPLSASMIQRYNEHQMDLAQLKQFIRQKLSDKYNEVFSDVSKDGYAGYIDGKTNQEAFYKYLKGLLNKIEGSGYFLDKIEREDFLRKQRTFDNGSIPHQIHLQEMRAIIRRQAEFYPFLADNQDRIEKILTFRIPYYVGPLARGKSDFAWLSRKSADKITPWNFDEIVDKESSAEAFINRMTNYDLYLPNQKVLPKHSLLYEKFTVYNELTKVKYKTEQGKTAFFDANMKQEIFDGVFKVYRKVTKDKLMDFLEKEFDEFRIVDLTGLDKENKAFNASYGTYHDLRKILDKDFLDNSKNEKILEDIVLTLTLFEDREMIRKRLENYSDLLTKEQVKKLERRHYTGWGRLSAELIHGIRNKESRKTILDYLIDDGNSNRNFMQLINDDALSFKEEIAKAQVIGETDNLNQVVSDIAGSPAIKKGILQSLKIVDELVKIMGHQPENIVVEMARENQFTNQGRRNSQQRLKGLTDSIKEFGSQILKEHPVENSQLQNDRLFLYYLQNGRDMYTGEELDIDYLSQYDIDHIIPQAFIKDNSIDNRVLTSSKENRGKSDDVPSEDVVNRMRPFWNKLLSSGLISQRKYNNLTKKELTPDDKAGFIKRQLVETRQITKHVARMLDERFNKEFDDNNKRIRRVKIVTLKSNLVSSFRKEFELYKVREINDYHHAHDAYLNAVVVKALLVKYPKLEPEFVYGEYPKYNSYRERKTATQKMFFYSNIMNMFKSKVKLADDQIVERPMIEVNDETGEIAWDKTKHITTVKKVLSYPQVNIVKKVEEQTIGQNGGLFDDNPKSPLEVIPSKLVPLKKALNPEKYGGYQKPTTAYPILLIVDTKQLIPISVMDKKRFEQNPVKFLKDKGYQQIEKNNFVKLPKYTLVDIGNGIKRLWASSKEVHKGNQLVVSKKSQDLLYHAHHLDNDYSNEYVKNHYQQFDILFNEITSFSKKCKLGKEHIQKIEEAYSKERDSASIEELADGFIKLLGFTQLGATSPFSFLGIKLNQKQYTGKKDYLLPCMEATLIHQSITGLYETRIDLSKLGGD

SEQ ID NO: 733 - protein, 1350 aa, Streptococcus mutans; identical to SEQ ID NO: 732

SEQ ID NO: 734 - protein, 1345 aa, Streptococcus mutans
MKKPYSIGLDIGTNSVGWAVVTDDYKVPDKKMKVLGNTDKSHIKKNLLGALLFDSGNTAEDRRLKRTARRRYTRRRNRILYLQEIFSEEMGKVDDSFFHRLEDSFLVTEDKRGERHPIFGNLEEEVKYHENFPTIYHLRQYLADNPEKTDLRLVYLALAHIIKFRGHFLIEGKFDTRNNDVQRLFQEFLAVYDNTFENSSLQEQNVQVEEILTDKISKSAKKDRVLKLFPNEKSNGRFAEFLKLIVGNQADFKKHFELEEKAPLQFSKDIYEEELEVLLAQIGDNYAELFLSAKKLYDSILLSGILTVTDVSTKAPLSASMIQRYNEHQMDLAQLKQFIRQKLSDKYNEVFSDVSKDGYAGYIDGKTNQEAFYKYLKGLLNKIEGSGYFLDKIEREDFLRKQRTFDNGSIPHQIHLQEMRAIIRRQAEFYPFLADNQDRIEKILTFRIPYYVGPLARGKSDFAWLSRKSADKITPWNFDEIVDKESSVEAFINRMTNYDLYLPNQKVLPKHSLLYEKFTVYNELTKVKYKTEQGKTAFFDANMKQEIFDGVFKVYRKVTKDKLMDFLEKEFDEFRIVDLTGLDKENKAFNASYGTYHDLRKILDKDFLDNSKNEKILEDIVLTLTLFEDREMIRKRLKNYSDLLTKEQLKKLERRHYTGWGRLSAELIHGIRNKESRKTILDYLIDDGNSNRNFMQLINDDALSFKEEIAKAQVIGETDNLNQVVSDIAGSPAIKKGILQSLKIVDELVKIMGHQPENIVVEMARENQFTNQGRRNSQQRLKGLTDSIKEFGSQILKEHPVENSQLQNDRLFLYYLQNGRDMYTGEELDIDYLSQYDIDHIIPQAFIKDNSIDNRVLTSSKENRGKSDDVPSKDVVRKMKSYWSKLLSAKLITQRKFDNLTKAERGGLTDDDKAGFIKRQLVETRQITKHVARILDERFYTETDENNKKIRQVKIVTLKSNLVSNFRKEFELYKVREINDYHHAHDAYLNAVIGKALLGVYPQLEPEFVYGDYPHFHGHKENKATAKKFFYSNIMNFFKKDDVRTDKNGEIIWKKDEHISNIKKVLSYPQVNIVKKVEEQTGGFSKESILPKGNSDKLIPRKTKKFYWDTKKYGGFDSPIVAYSILVIADIEKGKSKKLKTVKALVGVTIMEKMTFERDPVAFLERKGYRNVQEENIIKLPKYSLFKLENGRKRLLASARELQKGNEIVLPNHLGTLLYHAKNIHKVDEPKHLDYVDKHKDEFKELLDVVSNFSKKYTLAEGNLEKIKELYAQNNGEDLKELASSFINLLTFTAIGAPATFKFFDKNIDRKRYTSTTEILNATLIHQSITGLYETRIDLSKLGGD

SEQ ID NO: 735 - protein, 1345 aa, Streptococcus mutans
MKKPYSIGLDIGTNSVGWAVVTDDYKVSAKKMKVLGNTDKSHIKKNLLGALLFDSGNTAEDRRLKRTARRRYTRRRNRILYLQEIFAEEMSKVDDSFFHRLEDSFLVTEDKRGERHPIFGNLEEEVKYHENFPTIYHLRQYLADNPEKVDLRLVYLALAHIIKFRGHFLIEGKFDTRNNDVQRLFQEFLAVYDNTFENSSLQEQNVQVEEILTDKISKSAKKDRVLKLFPNEKSNGRFAEFLKLIVGNQADFKKHFELEEKAPLQFSKDTYEEELEVLLAQIGDNYAELFLSAKKLYDSILLSGILTVTDVSTKAPLSASMIQRYNEHQMDLAQLKQFIRQKLSDKYNEVFSDVSKDGYAGYIDGKTNQEAFYKYLKGLLNKIEGSGYFLDKIEREDFLRKQRTFDNGSIPHQIHLQEMRAIIRRQAEFYPFLADNQDRIEKILTFRIPYYVGPLARGKSDFAWLSRKSADKITPWNFDEIVDKESSAEAFINRMTNYDLYLPNQKVLPKHSLLYEKFTVYNELTKVKYKTEQGKTAFFDANMKQEIFDGVFKVYRKVTKDKLMDFLEKEFDEFRIVDLTGLDKENKAFNASYGTYHDLRKILDKDFLDNSKNEKILEDIVLTLTLFEDREMIRKRLENYSDLLTKEQVKKLERRHYTGWGRLSAELIHGIRNKESRKTILDYLIDDGNSNRNFMQLINDDALSFKEEIAKAQVIGETDNLNQVVSDIAGSPAIKKGILQSLKIVDELVKIMGHQPENIVVEMARENQFTNQGRRNSQQRLKGLTDSIKEFGSQILKEHPVEHSQLQNDRLFLYYLQNGRDMYTGEELDIDYLSQYDIDHIIPQAFIKDNSIDNRVLTSSKENRGKSDDVPSKNVVRKMKSYWSKLLSAKLITQRKFDNLTKAERGGLTDDDKAGFIKRQLVETRQITKHVARILDERFHTETDENNKKIRQVKIVTLKSNLVSNFRKEFELYKVREINDYHHTHDAYLNAVIGKALLGVYPQLEPEFVYGDYPHFHGHKENKATAKKFFYSNIMNFFKKDDVRTDKNGEIIWKKDEHISNIKKVLSYPQVNIVKKVEEQTGGFSKESILPKGNSDKLIPRKTKKFYWDTKKYGGFDSPIVAYSILVIADIEKGKSKKLKTVKALVGVTIMEKMTFERDPVAFLERKGYRNVQEENIIKLPKYSLFKLENGRKRLLASARELQKGNEIVLPNHLGTLLYHAKNIHKVDEPKHLDYVDKHKDEFKELLDVVSNFSKKYTLAEGNLEKIKELYAQNNGEDLKELASSFINLLTFTAIGAPATFKFFDKNIDRKRYTSTTEILNATLIHQSITGLYETRIDLSKLGGD

SEQ ID NO: 736 - protein, 1345 aa, Streptococcus mutans; identical to SEQ ID NO: 735

SEQ ID NO: 737 - protein, 1345 aa, Streptococcus mutans
MKKPYSIGLDIGTNSVGWSVVTDDYKVPAKKMKVLGNTDKSHIEKNLLGALLFDSGNTAEDRRLKRTARRRYTRRRNRILYLQEIFSEEMGKVDDSFFHRLEDSFLVTEDKRGERHPIFGNLEEEVKYHENFPTIYHLRQYLADNPEKVDLRLVYLALAHIIKFRGHFLIEGKFDTRNNDVQRLFQEFLAVYDNTFENSSLQEQNVQVEEILTDKISKSAKKDRVLKLFPNEKSNGRFAEFLKLIVGNQADFKKHFELEEKAPLQFSKDTYEEELEVLLAQIGDNYAELFLSAKKLYDSILLSGILTVTDVGTKAPLSASMIQRYNEHQMDLAQLKQFIRQKLSDKYNEVFSDVSKDGYAGYIDGKTNQEAFYKYLKGLLNKIEGSGYFLDKIEREDFLRKQRTFDNGSIPHQIHLQEMRAIIRRQAEFYPFLADNQDRIEKLLTFRIPYYVGPLARGKSDFAWLSRKSADKITPWNFDEIVDKESSAEAFINRMTNYDLYLPNQKVLPKHSLLYEKFTVYNELTKVKYKTEQGKTAFFDANMKQEIFDGVFKVYRKVTKDKLMDFLEKEFDEFRIVDLTGLDKENKVFNASYGTYHDLCKILDKDFLDNSKNEKILEDIVLTLTLFEDREMIRKRLENYSDLLTKEQVKKLERRHYTGWGRLSAELIHGIRNKESRKTILDYLIDDGNSNRNFMQLINDDALSFKEEIAKAQVIGETDNLNQVVSDIAGSPAIKKGILQSLKIVDELVKIMGHQPENIVVEMARENQFTNQGRRNSQQRLKGLTDSIKEFGSQILKEHPVENSQLQNDRLFLYYLQNGRDMYTGEELDIDYLSQYDIDHIIPQAFIKDNSIDNRVLTSSKENRGKSDDVPSKDVVRKMKSYWSKLLSAKLITQRKFDNLTKAERGGLTDDDKAGFIKRQLVETRQITKHVARILDERFNTETDENNKKIRQVKIVTLKSNLVSNFRKEFELYKVREINDYHHAHDAYLNAVIGKALLGVYPQLEPEFVYGDYPHFHGHKENKATAKKFFYSNIMNFFKKDDVRIDKNGEIIWKKDEHISNIKKVLSYPQVNIVKKVEEQTGGFSKESILPKGNSDKLIPRKTKKFYWDTKKYGGFDSPIVAYSILVIADIEKGKSKKLKTVKALVGVTIMEKMTFERDPVAFLERKGYRNVQEENIIKLPKYSLFKLENGRKRLLASARELQKGNEIVLPNHLGTLLYHAKNIHKVDEPKHLDYVDKHKDEFKELLDVVSNFSKKYTLAEGNLEKIKELYAQNNGEDLKELASSFINLLTFTAIGAPATFKFFDKNIDRKRYTSTTEILNATLIHQSITGLYETRIDLSKLGGD

SEQ ID NO: 738 - protein, 1345 aa, Streptococcus mutans; identical to SEQ ID NO: 737

SEQ ID NO: 739 - protein, 1355 aa, Streptococcus mutans
MKKSYSIGLDIGTNSVGWAVVTDDYKVPAKKMKVLGNTDKSHIKKNLLGALLFDSGNTAEDRRLKRTARRRYTRRRNRILYLQEIFSEEMGKVDDSFFHRLDESFLTDDDKNFDSHPIFGNKAEEDAYHQKFPTIYHLRKHLADSTEKADLRLVYLALAHMIKFRGHFLIEGELNAENTDVQKLFADFVGVYDRTFDDSHLSEITVDASSILTEKISKSRRLEKLINNYPKEKKNTLFGNLIALSLGLQPNFKTNFKLSEDAKLQFSKDTYEEDLEELLGKIGDDYADLFTLAKNLYDAILLSGILTADDSSTKAPLSASMIKRYAEHHEDLEKLKEFIKANKPELYHDIFKDETKNGYAGYIENGVKQDEFYKYLKNTLSKIAGSDYFLDKIEREDFLRKQRTFDNGSIPHQIHLQEMHAILRRQGDYYPFLKENQDRIEKILTFRIPYYVGPLARKNSRFAWAEYHSDEAVMPWNFDQVIDKESSAQAFIEHMTNNDLYLPNEKVLPKHSPLYEKYTVYNELTKIKYVTEIGEAKFFDANLKQEIFDGLFKHERKVTKKKLRTFLDKNFDEFRIVDIQGLDKETETFNASYATYQDLLKVIKDKVFMDNPENAEILENIVLTLTLFEDREMIKQRLAKYADVFDKKVIDQLARRHYTGWGRLSAKLLNGIRDKQSCKTIMDYLIDDAQSNRNLMQLITDDNLTFKDDIVKAQYVDNSDDLHQVVQSLAGSPAIKKGILQSLKIVDELVKVMGKEPEQIVVEMARENQTTAKGRRNSQQRYKRLKEAIKSLDRDLNHKILKEHPTDNQALQNNRLFLYYLQNGRDMYTGESLDINRLSDYDIDHVIPQAFIKDNSIDNRVLTSSKANRGKSDDVPSEDVVNRMRPFWNKLLSSGLISQRKYNNLTKKELTPDDKAGFIKRQLVETRQITKHVARMLDERFNKEFDDNNKRIRRVKIVTLKSNLVSSFRKEFELYKVREINDYHHAHDAYLNAVVVKALLVKYPKLEPEFVYGEYPKYNSYRERKTATQKMFFYSNIMNMFKSKVKLADDQIVERPMIEVNDETGEIAWDKTKHITTVKKVLSYPQVNIVKKVEEQTIGQNGGLFDDNPKSPLEVIPSKLVPLKKALNPEKYGGYQKPTTAYPILLIVDTKQLIPISVMDKKRFEQNPVKFLKDKGYQQIEKNNFVKLPKYTLVDIGNGIKRLWASSKEVHKGNQLVVSKKSQDLLYHAHHLDNDYSNEYVKNHYQQFDILFNEITSFSKKCKLGKEHIQKIEEAYSKERDSASIEELADGFIKLLGFTQLGATSPFSFLGIKLNQKQYTGKKDYLLPCMEATLIHQSITGLYETRIDLNKLGGD

SEQ ID NO: 740 - protein, 1355 aa, Streptococcus mutans; identical to SEQ ID NO: 739

SEQ ID NO: 741 - protein, 1125 aa, Streptococcus mutans
MTNGKILGLDIGIASVGVGIINAKTGNVEHASSRIFPAANADNNVERRSARGGRRLIRRKKHRLKRVEDLFEKYNIDTDFSNLNLNPYQLRVKGLNEQLSNEELFAILKNIAKRRGISYLDDAEDDSVGSSDYAKAIDENRKLLKKQTPGEIQLKRLEKYGQLRGNFTIQDENGEYHRLINVFSTSDYVKEARRILETQSYYNKFITESFVEDYIKILQGKRKYYVGPGNEKSRTDYGIYRTDGETLDNLFGILIGKCGFYPEEYRAAKASYTAQEYNFLNDLNNLTVPTETKKLSTEQKYQLVDFAKTASTLEAAKLLKEIAKLVGCQVEEIKGYRLDNKDKPDLHTFEPFRKLKSNLTTIAVENLSITTLDTLAHILTLNTEREGIEEAIQKELPNIFSDEQITGIIAVRKKNSQIFGKGWHSFSIKLMKELIPELYETSEEQMTILIRLKKVKTNSKITNRTKYINEQEVTDEIYNPVVSKSIRQTVKIINAAIKKYGAFDQIVIEMPRESNEEDERKFIADLQKSNAKEKDDAMKQAALLYNGKAELPHGVFHGHKELATKIRLWYQQGERCLYSGKHIDIHDLIHNQHMFEIDHVLPLSLSFDDSLANKVLVYSWANQEKGQRTPFQALPQMASAWSFRELRDYISKQKGISKKKRDYLLTEQDINKVEVKQKFIERNLVDTRYVSRVVLNTLQDALKVMNKETKISVIRGQFTSQLRRQWRIDKSRETYHHHAVDALIIAASSQLRLWKKQNNPMFAEDKHGQKINLDTGEVLSDDAYKELVYQAPYQGFVNTISSKSFEDEILFSYQVDSKVNRKISDATIYATRQAQLGKDKKEETYVLGKIKDIYSQAGYDAFRKKYDKDKAVFLMYQKDPETWEKVIEVILRDYKELDDKGKEIGNPFERYKVKHGFVRKYSRKNKGTEIKSLKYYDNKLGNHIDITPNNSKHSVVLQSINPWRADLYFNPETTKYELMGLKYADLSFEKGTGKYSISREKYDEIKEREGISSKSEFKFTLYKNDLILVKDIGNHKELIARFNSKNDTSKHYVELKPWNKAKFDSEEELIPAFGKVAKSGQFIKGLNKPDLSIYKVKTDILGHKYYIKKEGDKPKLNFENKIKNK

SEQ ID NO: 742 - protein, 1125 aa, Streptococcus mutans
MTNGKILGLDIGIASVGVGIINAKTGNVEHASSRIFPAANADNNVERRSARGGRRLIRRKKHRLKRVEDLFEKYNIDTDFSNLNLNPYQLRVKGLNEQLSNEELFAILKNIAKRRGISYLDDAEDDSVGSSDYAKAIDENRKLLKKQTPGEIQLKRLEKYGQLRGNFTIQDENGEYHRLINVFSTSDYVKEARRILETQSYYNKFITESFVEDYIKILQGKRKYYVGPGNEKSRTDYGIYRTDGETLDNLFGILIGKCGFYPEEYRAAKASYTAQEYNFLNDLNNLTVPTETKKLSTEQKYQLVDFAKTASTLGAAKLLKEIAKLVGCQVEEIKGYRLDNKDKPDLHTFEPFRKLKSNLTTIAVENLSITTLDTLAHILTLNTEREGIEEAIQKELPNIFSDEQITEIIAVRKKNSQIFGKGWHSFSIKLMKELIPELYETSEEQMTILTRLKKVKTNSKITNRTKYINEEEITDEIYNPVVSKSIRQTVKIINATIKKYGAFDQIIIEMPRESNEEDERKFIADLQKSNAKEKDDAMKQAALLYNGKDELPHDVFHGHKELATKIRLWYQQGERCLYSGKHIDIHDLIHNQHMFEIDHVLPLSLSFDDSLANKVLVYSWANQEKGQRTPFQALPQMASAWSFRELRDYISKQKGISKKKRDYLLTEQDINKVEVKQKFIERNLVDTRYVSRVVLNTLQDALKVMNKETKISVIRGQFTSQLRRQWRIDKSRETYHHHAVDALIIAASSQLRLWKKQNNPMFAEDKHGQKINLDTGEVLSDDAYKELVYQAPYQGFVNTISSKSFEDEILFSYQVDSKVNRKISDATIYATRQAQLGKDKKEETYVLGKIKDIYSQAGYDAFRKKYDKDKAVFLMYQKDPETWEKVIEVILRDYKELDDKGKEIGNPFERYKVKHGFVRKYSRKNKGTEIKSLKYYDNKLGNHIDITPNNSKHSVVLQSINPWRADLYFNPETTKYELMGLKYADLSFEKGTGKYSISREKYDEIKEREGISSKSEFKFTLYKNDLILVKDIGNHKELIARFNSKNDTSKHYVELKPWNKAKFDSEEELIPAFGKVAKSGQFIKGLNKPDLSIYKVKTDILGHKYYIKKEGDKPKLNFENKIKNK

SEQ ID NO: 743 - protein, 1125 aa, Streptococcus mutans; identical to SEQ ID NO: 742

SEQ ID NO: 744 - protein, 1125 aa, Streptococcus mutans; identical to SEQ ID NO: 741

SEQ ID NO: 745 - protein, 670 aa, Streptococcus oralis
MAKFNKNYSIGLDIGVSSVGYAVVTEDYRVPAFKFKVLGNTEKEKIKKNLIGSTTFVPAQSAQGTRVFRVNRRRIDRRNHRIAYLRDIFQKEIGKIDKNFYRRLDESFRVLGDKSEDIQIKQPFFGNKELETAYHKKYPTIYHLRKHLADADKNSPVADIREVYMALSHIFKYRGHFLTLGKIDPNNINMQNSWIDFIESCQDAFDLEISDESKTIAAIFKSSDNRQEKVKGILSYFQPELAKKDKSIFKQLLQLLFGLKTKFKECFELEEEPDLNFSKENYDENLENLLGTLEEDFPDVFAKLKILRDTILLSDMLTYTGATHARFSATMVERYEEHRKDLQRFKSFVKQNLSEQDYLDIFGRKTPNGFDVDKETKGYVGYISNKMVLTNKQKTIQQNFYDYISGKITGIEGAEYFLNKISDGTFLRKLRTTDNGTIPNQIHAYELEKIIERQGRDYPFLLENKDKLLSILTFKIPYYVGPLAKGNNSRFAWIKRTTSQDVLDNNDEDTKNGKIRPWNYHKLINMDETRDAFITNLIGNDIILLNEKVLPKRSLIYEEVMLQNELTRIKYKDKYGKIHFFDSELRQEIINNLFKTNSKRVSSAMLLAYLENFTNLQAVEIVSGIEKGKSLNSTLKTYNDLKTIFSEDLLDSEIYQKELEEIIKVITVFV

SEQ ID NO: 746 - protein, 1373 aa, Streptococcus oralis
MENKNYSIGLDIGTNSVGWAVITDDYKVPSKKMKVLGNTDKRFIKKNLIGALLFDEGTTAEARRLKRTARRRYTRRKNRLRYLQEIFAEEMSKVDSSFFHRLDDSFLIPEDKKGSKYPIFATLIEEKEYHKQFPTIYHLRKQLADSKEKTDLRLIYLALAHMIKYRGHFLYEDTFDIKNNDIQKIFNEFISIYNNTFEGNSLSGQNVQVEAIFTDKISKSAKRERVLKLFPDEKSTGLFSEFLKLIVGNQADFKKHFDLEEKAPLQFSRDTYDEDLENLLGQIGDDFADLFVAAKKLYDAILLSGILTVTDPSTKAPLSASMIERYENHQKDLATLKQFIKTNLPEKYDEVFSDQSKDGYAGYIDGKTTQESFYKYIKNLLSKFEGADYFLEKIEREDFLRKQRTFDNGSIPHQIHLQEMNAILRRQGEHYPFLKENKEKIEKILTFRIPYYVGPLARGNRDFAWLTRNSDQAIRPWNFEEIVDKASSAESFINKMTNYDLYLPEEKVLPKHSLLYETFAVYNELTKVKFIAEGLRDYQFLDSRQKKDIFYTLFKAEDKRKVTEKDIIQYLHTVDGYDGIELKGIEKQFNASLSTYHDLLKIIKDKEFMDDPNNEEILENIVHTLTIFEDREMIKQRLAQYDSLFDEKVIKALTRRHYTGWGKLSSKLINGIRDKQTGKTILDYLMDDGYNNRNFMQLINDDELSFKEIIKKAQVVGKTDDVKQVVQELPGSPAIKKGILQSIKLVDELVKVMGHEPESIVIEMARENQTTARGKKNSQQRYKRIEDSLKILASGLNAKILKEHPTDNIQLQNDRLFLYYLQNGRDMYTGKPLDINQLSSYDIDHIVPQAFIKDDSLDNRVLTSLKDNRGKSDNVPSLEVVEKMKTFWQQLLDSKLISYRKFNNLTKAERGGLDERDKVGFIKRQLVETRQITKHVAQILDARYNTEVNEKDKKNRTVKIITLKSNLVSNFRKEFRLYKIREINDYHHAHDAYLNAVVAKAILKKYPKLEPEFVYGDYQKYDLKRYISRSKDPKEIEKATEKYFFYSNLLNFFKEEVHYADGTIVKRENIEYSKDTGEIAWNKEKDFATIKKVLSLPQVNIVKKREVQTGGFSKESILPKGNSDKLIPRKTKDILWDTTKYGGFDSPVIAYSILLIADIEKGKAKRLKTVKTLVGITIMEKATFEKSPIAFLENKGYHNVRKENILCLPKYSLFELKNGRRRMLASAKELQKGNEIVLPVHLTTLLYHAKNIHRLDEPEHLEYIQKHRNEFKGLLNLVSEFSQKYVLADANLEKIKNLYADNEQADIEILANSFINLLTFTALGAPAAFKFFGKDVDRKRYTTVSEILNATLIHQSITGLYETRIDLSKLGED

SEQ ID NO: 747 - protein, 1371 aa, Streptococcus oralis
MENKNYSIGLDIGTNSVGWSVITDDYKVPSKKMKVLGNTDKRFIKKNLIGALLFDEGTTAEARRLKRTARRRYTRRKNRLRYLQEIFAEEMSKVDSSFFHRLDDSFLIPEDKRGSKYPIFATLAEEKEYHKQFPTIYHLRKQLADSKEKTDLRLIYLALAHMIKYRGHFLYEDTFDIKNNDIQKIFSEFISIYDNTFEGSSLSGQNAQVEAIFTDKISKSAKRERVLKLFPDEKSTGLFSEFLKLIVGNQADFKKHFDLGEKAPLQFSKDTYDEDLENLLGQIGDDFADLFLVAKKLYDAILLSGILTVTDPSTKAPLSASMIERYENHQKDLAVLKQFIKNNLPEKYDEVFSDQSKDGYAGYIDGKTTQEAFYKYIKNLLSKFEGTDYFLEKIEREDFLRKQRTFDNGSIPHQIHLQEMNAILRRQGEHYPFLKDNKEKIEKILTFRIPYYVGPLARGNRDFAWLTRNSDEAIRPWNFEEIVDKASSAEDFINKMTNYDLYLPEEKVLPKHSLLYETFAVYNELTKVKFIAEGLRDYQFLDSGQKKQIVTQLFKEKRKVTEKDIIQFLHNVDGYDGIELKGIEKQFNASLSTYHDLLKIIKDKEFMDDSKNEEILENIVHTLTIFEDREMIKQRLAQYDSLFDEKVIKALIRRHYTGWGKLSAKLIDGICDKQTGNTILDYLIDDGKNNRNFMQLINDDGLSFKEITQKAQVVGKTDDVKQVVQELPGSPAIKKGILQSIKIVDELVKVMGHTPESIVIEMARENQTTARGKKNSQQRYKRIEDALKNLASGLDSNILKEHPTNNIQLQNDRLFLYYLQNGRDMYTGKPLDINQLSSYDIDHIVPQAFIKDDSLDNRVLTSLKDNRGKSDNVPSIEVVQKRKAFWQQLLDSKLISERKFNNLTKAERGGLDERDKVGFIKRQLVETRQITKHVAQILDARFNKEVNEKDKKNRTVKIITLKSNLVSNFRKEFRLYKVREINDYHHAHDAYLNAVVAKAILKKYPKLEPEFVYGDYQKYDLKRYISRSRNPKEVEKATEKYFFYSNLLNFFKEEVHYADGTIVKRENIEYSKDTGEIAWNKEKDFATIKKVLSYPQVNIVKKREVQTGGFSKESILPKGNSDKLIPRKTKDILWETTKYGGFDSPVIAYSILLIADIEKGKAKKLKTVKTLVGITIMEKAAFEENPITFLENKGYHNVRKENILCLPKYSLFELENGRRRLLASAKELQKGNEIVLPVYLTTLLYHSKNVHKLDEPEHLEYIQKHRNEFKDLLNLVSEFSQKYVLADANLEKIQNLYADNEQADIEILANSFINLLTFTALGAPAAFKFFGKDIDRKRYTTVSEILNATLIHQSITGLYETRIDLSKLGED

SEQ ID NO: 748 - protein, 1121 aa, Streptococcus oralis
MNGLVLGLDIGIASVGVGILEKNSGKIIHANSRLFPAATADNNVERRKNRQARRLNRRKKHRGVRFQDLFEDYGLLTDFSKVSINLNPYRLRVDGLNQQLTNEELFIALKNIVKRRGISYLDDASEDGGAVSSDYGKAVEENRKLLAEQTPGQIQLERFEKYGQVRGDFTVVENGEKCRLINVFSTSAYRKEAEKILRKQQEFNNQITDEFIEDYLKILTGKRKYYHGPGNEKSRTDYGRFRTDGTTLDNIFGVLIGKCTFYPNEYRASKSSYTAQEFNLLNDLNNLTVPTETKKLSEEQKKVIVEYAKEAKTLGASTLLKYIVKMIDASVDQISGYRVDVNNKPEMHTFEVYRKMQSLETISVGELSRNVLDELAHILTLNTEREGIEEAINSKLMGVFSQDQVLELVQFRKNNSSLFSKGWHNFSLKLMMELIPELYETSEEQMTILTRLGKQKSKETSKRTKYIDEKELTEEIYNPVVAKSVRQAIKIINEATKKHGIFDNIVIEMARENNEEDAKKDYIKRQKANQDEKNAAMEKAAFQYNGKKELPGNIFNGHKELATKIRLWHQQGEKCLYTGKTIPISDLIHNQYKYEIDHILPLSLSFDDSLSNKVLVHATANQEKGQRTPFQALDSMDDAWSYREFKSYVKDLKSLSNKKKDYLLTEEDISKIEVKQKFIERNLVDTRYSSRVVLNALQDFYKSHQFDTTISVVRGQFTSQLRRKWGLEKSRETYHHHAVDALIIAASSQLRLWKKQNNPLITYKEGQFVDSQTGEIISLTDDEYKELVFKAPYDHFVDTLHSKTFEDGILFSYQVDSKYNRKISDATIYATRKAKLDKDKSEETYVLGKIKDIYSQAGYDAFIKIYNKDKRKFLMYHKDPQTFEKVIEEILRTYPSKERNDKNKEVPCNPFEKYRQENGPIRKYSKKGNGPEIKCLKYYDNKLGNYIDISPDGSDNQVVLQSLKPWRTDVYFNHQTKEYELMGLKYSDLSFEKGSGKYSISNEKYNSIKRIEGVNEQSEFKFTLYKNDLILIKDSENNEQKLFRFNSRNDTAKHYVELKPYDKARFDGQQELITILGNVAKGGQCLKGLNKSNISIFKVKTDVLGKKHIIKKEGDEPKLKF

SEQ ID NO: 749 - protein, 1134 aa, Streptococcus oralis
MNGLVLGLDIGIASVGVGILEKNSGKIVHASSRIFPAATADNNVERRKNRQARRLHRRKKHRGARLKDLFEYYGLLTDFSKVSINLNPYRLRVDGLDQQLTNEELFIALKNIVKRRGISYLDDASEDGGTVSSDYGKAVEENRKLLAEQTPGQIQLERFEKYGQLRGDFTVVENSEKCRLINVFSTSAYKKEAERILRKQQEFNNQITDEFIEDYLKILTGKRKYYHGPGNEKSRTDYGRFRTDGATLDNIFGILIGKCTFYPNEYRASKASYTAQEFNLLNDLNNLTVPTETKKLSEEQKKTIIEYAKSAKTLGASTLLKYIAKMIDASVDQIRGYRVDVNNKPEMHTFEVYRKMQSLETISVGELSRNILDELAHILTLNTEREGIEEAINTKLRDSFSQDQVLELVQFRKNNSSLFSKGWHNFSLKLMMELIPELYETSEEQMTILTRLGKQKSKETSKRTKYIDEKEVTEEIYNPVVAKSVRQAIKIINEATKKHGIFDNIVIEMARENNEEDAKKDYIKRQKANQDEKYAAMEKAAFQYNGKKELPDNIFHGHKELATKIRLWHQQGEKCLYTGKSIPISDLIHNQYKYEIDHILPLSLSFDDSLSNKVLVLATANQEKGQRTPFQALDSMDDAWSYREFKSYVKESKLLGNKKKEYLLTEEDISKIEVKQKFIERNLVDTRYSSRVVLNALQDFYKNHNFDTTISVVRGQFTSQLRRKWGLEKSRETYHHHAVDALIIAASSQLRLWKKQNNPLIAYKEGQFVDSQTGEIISLTDDEYKELVFKAPYDHFVDTLSSKTFEDSILFSYQVDSKFNRKISDATIYATRKAKLDKEKKEYTYTLGKIKDIYSLGTKTPSKTGFYKFLDLYNKDKSQFLMFQKDRKTWDEVIEKIMEQYRPFKEYDKAGKLVDFNPFEKYRQENGPIRKYSKKGNGPEIKSLKYYDILLGKHKNITPEGSRNTVALLSLNPWRTDVYYNMETKKYEFLGLKYADLPFEEGGAYGISTETYNELREKEGIGKNSEFKFTLYKNDLILIKDTETNCQQFFRFWSRTGKDNPKSFEKHKIELKPYEKAKFEKGEELEVLGKVPPSSNQFQKNMQIENLSIYKVKTDVLGNKHFIKKEGDKPKLKF

SEQ ID NO: 750 - protein, 550 aa, Streptococcus oralis
MYSLDKNGSPTPLYRDQLNQYEVDHIIPYSFLPIDSIDNKVLTHRENNQRKLDNIPDKETVANMKPFWEKLYNAKLISQTKYQRLTTSERTPDGVLTESMKAGFIERQLVETRQIIKHVARILDNRFSDTKIITLKSQLVTNFRNTFHIAKIRELNDYHHAHDAYLAVVVGQTLLKAYPKLAPELIYGHHAHFNRHEENKATIRKYLYSNIMRFFNNPDSKVSKDIWDCNRDLPIIKDIIYNSQVNFVKRTMIKKGAFYNQNPVGKFNKQIAANNRYPLKTKVSSLDTSIYGGYGPMNSALSIIIIAERFNEKKCKIETVKEFHDIFIIDYKKFNNDPFQFLNDTSENGFLKKNNINRVLAFYRVPKYSLMQKIDGTRMLFESKSNLHKATQFKLTKTQNELFFHMRRLLTKSNLMDLKSESAIKESQNFILKHKEEFDNISNQLSAFSQKMLGDTTSLKNLIKGYNERKIKEINSSEETIKYFYDNFIKMFSFVKSGAPKDINDFFNNKYTVARMRPKPDKKLLNATLIHQSITGLYETRIDLSKLGED

SEQ ID NO: 751 - protein, 1140 aa, Streptococcus parasanguinis
MNGLVLGLDIGIASVGVGILKKDIGEIIHTNSRLFSAATADSNIERRGHRGGKRLTRRKKHRSIRLHDLFEDFGLLTDFSKVSINLNPYQLRVQGLDNQLTNEELFIALKNIVKRRGISYLDDASEDGGTVSSDYGKAVEENRKLLAEQTPGQIQLDRFEKYGQVRGDFNVVENGEKRRLINVFTTSAYSKEAERILRKQQEFNKKITDEFIEDYLTILTGKRKYYHGPGNEKSRTDYGRYTTKKDPEGKYITLDNIFGILIGKCTFYPDEYRASKASYTAQEFNLLNDLNNLTVPTETKKLSEEQKKTIIKYAKTAKTLGASTLLKYIAKLIGASVDQIHGYRIDPNKKPEMHTFETYRKMQSLETISVEELPRKVLDELAHILTLNTEREGIEEAINATLKDTFSQDQVLELVQFRKNNSSLFSKGWHSFSLKLMMELIPELYETSEEQMTILTRLGKQKSKETSKRTKYIDEKELTEEIYNPVVAKSVRQAIKIINEATKKYGIFDNIVIEMARENNEEDAKKEYIKRQKANLDEKNAAMEKAAFQYNGKKELPDNVFHGHKELATKIRLWHQQGEKCLYTGKNIPISDLIQNQYKYEIDHILPLSLSFDDSLSNKVLVLATANQEKGQRTPFQALDSMDDAWSYREFKSYVKDSKLLGNKKKEYLLTEEDISKIEVKQKFIERNLVDTRYSSRVVLNALQDFYKEHQFDTTISVVRGQFTSQLRRKWGLEKSRETYHHHAVDALIIAASSQLRLWKKQNNPLISYTEGQFVDQVTGEIISLSDDEYKELVFKAPYDHFVDTLKSKKFEDSILFSYQVDSKYNRKISDATIYATRKAKLDKENKEYTYTLGKIKDIYALGTKSPSKTGFYKFLDLYNKDKSQFLMFQKDRKTWDEVIEKIIEQYRPFKEYDENGKEVDFNPFEKYRIENGPIRKYSKKGNGPEIKSLKYYDNLLGKFVDITPSESKNPVALLSLNPWRTDVYYNTETSKYEFLGLKYADLCFEKGGAYGISEVKYNKIREKEGIGKESEFKFTLYKNDLILIKDTETNCQQIFRFWSRTGKDNPKSFEKHKIELKPYEKARFEKGEELEVLGKVPPSSNQLQKNMQIENLSIYKVKTDVLGNKHFIKKEGEEPKLKF

SEQ ID NO: 752 - protein, 1374 aa, Streptococcus pseudoporcinus
MKKRYSYSIGLDIGTNSVGWAVINEDYKVPAKKMTVFGNTDRKTIKKNLLGTVLFDSGETAQARRLKRTNRRRYTRRRYRLCQLQNIFATEMVKVDDTFFQRLSESFFYYQDKAFDKHPIFGNSKEERAYHKTYPTIYHLRKDLADRDQKADLRLIYLALSHIIKFRGHFLIEGKLNSENTDVQKLFIALVTVYNLLFEEEPIAGETCDAKALLTAKTSKSKRLESLISEFPGQKKNGLFGNLLALALGLRPNFKSNFGLSEDAKLQITKDTYEEELDNLLAEIGDHYADLFLAAKNLSDAILLSDILTLSDENTRAPLSASMIKRYEEHQEDLALLKKLVKEQMPEKYWEIFSNAKKNGYAGYIEGKVSQEDFYRYIKPILSRLKGGDEFLAKIDRDDFLRKQRTFDNGSIPHQIHLKELHAILRRQEKYYPFLAEQKEKIEQLLCFRIPYYVGPLAKGGNSSFAWLKRRSDEPITPWNFKDVVDEEASAQAFIEGMTNYDTYLPEEKVLPKHSPLYEMFTVYNELTKVKYIAENMTKPLYLSAEQKEAIIDHLFKQTRKVTVKDLKEKYFSQIEGLENVDVTGVEGAFNASLGTYNDLLKIIKDKAFLDDEANAEILEEIVLILTLFQDEKLIEKRLAKYANLFEKSVLKKLRKRHYRGWGRLSRQLIDGMKDKASGKTILDFLKADDFANRNFIQLINDSSLDFEKLIDDAQKKAIKRESLTEAVANLAGSPAIKKGILQSLKVVDEIVKVMGHNPDNIVIEMSRENQTTAQGLKNARQRLKKIKEVHKKTGSRILEDNSERITNLTLQDNRLYLYLLQDGKDMYTGQDLDINNLSQYDIDHIIPQSFIKDNSIDNLVLTTQKANRGKSDNVPSIEVVRDMKDRVWRRQLANGAISRQKFDHLTKAERGGLADSDKARFLRRQLVETRQITKHVAQLLDSRFNSKSNQNKKLARNVKIITLKSKIVSDFRKDFGLYKLREVNNYHHAHDAYLNAVVGTALLKKYPKLEAEFVYGDYKHFDLVKLISKSDPSLGKATAKVFFYSNIMNFFKEELSLADGTLMKRPVIETNTETGEVVWDKVKDFKTIRKVLSYPQVNIVKKTEIQSGAFSKESVLSKGNSDKLIERKKGWDPKKYGGFDSPNTAYSIFVVAKVAKRKAQKLKTVKEIVGITIMEQAEYEKDNIAFLEKKGYQDIQEKLLIKLPKYSLFELENGRRRLLASANEFQKGNELALSGKYMKFLYLASRYDKLSSKIESEQQKKLFVEQHLHYFDEILDIVVKHATCYIKAENNLKKIISLYKKKEAYSINEQALNMLNLFIFTSLGAPSTFVFFDETIDRKRYTTSSDVLNGILIQQSITGLYETRIDLSRFGGD

SEQ ID NO: 753 - protein, 1052 aa, Streptococcus pyogenes
LSASMIKRYDEHHQDLTLLKALVRQQLPEKYKEIFFDQSKNGYAGYIDGGASQEEFYKFIKPILEKMDGTEELLAKLNREDLLRKQRTFDNGSIPHQIHLGELHAILRRQEDFYPFLKDNREKIEKILTFRIPYYVGPLARGNSRFAWMTRKSEETITPWNFEEVVDKGASAQSFIERMTNFDKNLPNEKVLPKHSLLYEYFTVYNELTKVKYVTEGMRKPAFLSGEQKKAIVDLLFKTNRKVTVKQLKEDYFKKIECFDSVEISGVEDRFNASLGTYHDLLKIIKDKDFLDNEENEDILEDIVLTLTLFEDREMIEERLKTYAHLFDDKVMKQLKRRRYTGWGRLSRKLINGIRDKQSGKTILDFLKSDGFANRNFMQLIHDDSLTFKEDLQKAQVSGQGDSLHEHIANLAGSPAIKKGILQTVKVVDELVKVMGRHKPENIVIEMARENQTTQKGQKNSRERMKRIEEGIKELGSDILKEYPVENTQLQNEKLYLYYLQNGRDMYVDQELDINRLSDYDVDHIVPQSFLKDDSIDNKVLTRSDKNRGKSDNVPSEEVVKKMKNYWKQLLNAKLITQRKFDNLTKAERGGLSELDKAGFIKRQLVETRQITKHVAQILDSRMNTKYDENDKLIREVRVITLKSKLVSDFRKDFQFYKVREINNYHHAHDAYLNAVVGTALIKKYPKLESEFVYGDYKVYDIRKMIAKSEQEIGKATAKYFFYSNIMNFFKTEITLANGEIRKRPLIETNGETGEIVWDKGRDFATVRKVLSMPQVNIVKKTEVQTGGFSKESILPKRNSDKLIARKKDWDPKKYGGFDSPTVAYSVLVVAKVEKGKSKKLKSVKELVGITIMERSSFEKDPVDFLEAKGYKEVRKDLIIKLPKYSLFELENGRKRMLASAGELQKGNELALPSKYVNFLYLASHYEKLKGSPEDNEQKQLFVEQHKHYLDEIIEQISEFSKRVILADANLDKVLSAYNKHRDKPIREQAENIIHLFTLTNLGAPAAFKCFDTTIGRNRYKSIKEVLDATLIHQSITGLYETRIDLSQLGGD

SEQ ID NO: 754 - protein, 1368 aa, Streptococcus pyogenes; identical to SEQ ID NO: 42

SEQ ID NO: 755 - protein, 1367 aa, Streptococcus pyogenes; identical to SEQ ID NO: 246

SEQ ID NO: 756 - protein, 1368 aa, Streptococcus pyogenes [sequence omitted]

SEQ ID NO: 757 - protein, 1370 aa, Streptococcus ratti
MKKPYSIGLDIGTNSVGWAVITDDYKVPAKKMKVLGNTDKNYIKKNLLGALLFDSGNTAEDRRLKRTARRRYTRRRNRLLYLQDIFSDEMNKVDESFFHRLEDSFLVSEDKRGDHHPIFGNVVDEVKYHEQFPTIYHLRKYLADTPEKADLRLVYLALAHMIKFRGHFLIDDPKLDVKNTDSQELFSQFLTAYDVTQEDSHLADVKINISDIITEKMNKSRKVEALLFHFPSQKKNSFFGNLVSLVFGLLPNFKTNFNLAEDAKLQLSKDSYDEDLENLLGQIGDEYTDVFVAARKLYDSILLSGILTVNDLSTKAILSASMVRRYEEHNKDLAKLKAFVKANFTHDVFKEVFSDASKNGYAGYIEGKTSQEDFYKYVKNLIGKVDGSADFIEKIDREDFLRKQRTFDNGSIPHQVHLAEMKAILRRQGEYYPFLKEHAEKIQQILTFRIPYYVGPLDRHGHSDFAWASFNSEEKVTPWNFEEIIDKNKSAQAFIERMTNQDLYLPNEKVLPKHSPLYEKYTVYNELTKIKYVTETGTAKFFDANLKQEIFDGLFKKERKVTKRKLLTFLEKNFDEFRIVDIQGLDKETETFNASYGIYQDLLKIIKDKAFMDDSENADILEDIVLTLTLFEDREMIKQRLAKYADLFDKKVIDNLARRRYTGWGRLSAKLLNGIRDKRSRKTIMDYLVDDGRSNRNLMQLITDDNLTFKDEIAKAQYSDNSDDLHQVVQDLAGSPAIKKGILQSVKIVDELVKVMGYEPEQIVVEMARENQTTAKGRRNSQQRYKRLEEAIKNLDRDLNYKILKEHPTDNQALQNDRLFLYYLQNGRDMYTGESLDINRLSDYDIDHIIPQAFIKDNSIDNRVLVSSAKNRGKSDDVPSEDVVNRMRPFWNKLLNCGLISQRKYSNLTKKELTPNDKAGFIKRQLVETRQITKHVARILDEHFNKEFDEDKKRIRKVKVVTLKSNLVSNFRKEFELYKVREINDYHHAHDAYLNAVVAKALLMKYPKLEPEFVYGEYPKYNSYRERKTATQRMFFYSNIMNMFKSKVKLADERIIERPMIEVNDETGEIAWDKTKHIATVKKVLSYPQINIVKKVEEQTGGLTNETIYPRGSFDKLLNRKNTLEASKYGGFGSPTVAYCVLVVADSKNENGKVKKLKLGSELLGITILEKNDFENNSLDFLSRKGYQGVQEKKIIKLPKYSLFEFQDGSRRMLSSVMANDNKRGDLQKANEMILPAYLVKLLYHAKHINSVGEPAHKNYINEHCSEFQDLLNYIRQFADKFVDVDKNLSKIRSLSKSMAEYSVSEICSSFVNLLTLTALGAPADFKFFGTTIPRKRYGSPQSILSATLIHQSITGLYETRIDLSKLGED

SEQ ID NO: 758 - protein, 1135 aa, Streptococcus salivarius
MSDLVLGLDIGIGSVGVGILNKVTGEIIHKNSRIFPAAQAENNLERRTNRQGRRLTRRKKHRRVRLNHLFEESGLITDFTKVSINLNPYQLRVKGLTAELSNEELFIALKNMVKHRGISYLDDASDDGNSSVGDYAQIVKENSKQLETKTPGQIQLERYQKYGQLRGDFTVEEDGRKHRLINVFPTSAYHAEALRILQTQQEFNPQITDEFINSYLEILTGKRKYYHGPGNEKSRTDYGKYTTKKDAQGQYITLNNIFGILIGKCTFYPEEYRAAKASYTAQEFNLLNDLNNLTVPTETKKLSEEQKYQIITYVKNEKAMGPAKLFKYIAKLLACDIADIKGYRIDKSDKAEIHTFEAYRKMKTLETIDIEQIEREKLDKLAYVLTLNTEREGIQEALDHEFADGTFSQEQVDELVQFRKANSSIFGKGWHSFSVKLMMELIPELYATSEEQMTILTRLGKQKTTSSSNKTKYIDEKQLTEEIYNPVVAKSVRQAIKIVNAAIKKYGDFDNIVIEMARETNEDDEKKAIQKIQKANKAEKDAAMRKAANQYNGKAELPHSVFHGHKQLATKIRLWHQQGERCLYTGKTISIHDLINNPNQFEIDHILPLSITFDDSLANKVLVYATANQEKGQRTPYQALDSMDDAWSFRELKAFVRESKALSNKKKEYLLTEEDISKFDVRKKFIERNLVDTRYASRVVLNALQEHFKAHKIDTKVSVVRGQFTSQLRRHWGIDKTRDTYHHHAVDALIIAASSQLNLWKKQKNTLVSYSEDQLLDIETGELISDDEYKESVFKAPYQHFVDTLKSKEFEDSILFSYQVDSKFNRKISDATIYATRQAKVGKDKKDETYVLGKIKDIYALGTKTPSKTGFYKFLDLYNKDKSQFLVYQKDRKTWDEVIEKIMEQYRPFKESDKNGKEVDFNPFEKYRIENGPIRKYSRKGNGPEIKSLKYYASKLGNHIDITPKDSNNKVVLQSVSPWRADVYFNKTTGSYEILGLKYADLQFEKGTGTYRISEEKYNDIKKKEGVDSDSEFKFTLYKNDLLLIKDTETKEQRLFRFLSRSMPNKKHYVELKPYSKDKFEKNESLIEILGSADKSGRCIKGLAKSNLSIFKVRTDVLGNQHIIKNEGDKPKLDF

SEQ ID NO: 759 - protein, 1127 aa, Streptococcus salivarius
MSDLVLGLDIGIGSVGVGILNKVTGEIIHKNSRIFPAAQAENNVERRINRQGRRLTRRKKHRRVRLNHLFEESGLITDFTNVSINLNPYQLRVKGLTDELSNEELFIALKNMVKHRGISYLDDASDDGNSSVGDYAQIVKENSKQLETKTPGQIQLERYQKYGQLRGDFTVEEDGKKHRLINVFPTSAYRAEALRILQTQQEFNPQITDEFINSYLQILTGKRKYYHGPGNEKSRTDYGRYTTKKDSEDEYITLDNIFGILIGKCTFYPEEYRAAKASYTAQEFNLLNDLNNLTVPTETKKLSEEQKNQIITNVKNEKAMGPAKLFKYIAKLLSCDVADIKGYRIDKSDKAEIHTFEAYRKMKTLATIDIEQMERENLDKLAYVLTLNTEKEGIQEALEHEFADGTFSQEQIDELVQFRKANSSIFGKGWHSFSVKLMMELIPELYATSEEQMTILTRLGKQKTTSSSNKTKYIDEKQLTEEIYNPVAAKSVRQAIKIVNAAIKEYGDFDNIVIEMARETNEDDEKKAIQKIQKANKDEKDAAMLKAANQYNGKAELPHSVFHGHKQLATKIRLWHQQGERCLYTGKTISIHDLINNSNQFEIDHILPLSITFDDSLANKVLVYATANQEKGQRTPYQALDSMDDAWSFRELKAFVRDSKALSNKKKEYLLTEEDISKFDVRKKFIERNLVDTRYASRVVLNALQEHFRVHKTDTKVSVVRGQFTSQLRRHWGIEKTRDTYHHHAVDALIIAASSQLNLWKKQKNTLVSYSEDQLLDIETGELISDDEYKESVFKAPYQHFVDTLKSKEFEDSILFSYQVDSKFNRKISDATIYATRQAKVGKDKKDETYVLGKIKDIYSQTGYDAFIKIYKKDKSKFLMYRHDPQTFEKVIEPILENYPNKELNEKGKEVPCNPFLKYKEDHGYIRKYSKKGNGPEIKSLKYYDSKLGNHIDITPKNSNNKVVLQSVSPWRADVYFNKTTGKYEILGLKYADLKFEKGTGTYKISEEKYNDIKIKEGVDSDSEFKFTLYKNDLLLIKDTETKEQQLFRFLSRTMPNVKHYVELKPYDKQKFDDNEELIKILGIVAKGGQCKKGVSKPNISIYKIRTDVLGNQHIIKNEGDKPKLDF

SEQ ID NO: 760 - protein, 1385 aa, Streptococcus salivarius
MTKPYSIGLDIGTNSVGWAVITDDYKVPSKKMKVLGNTSKKYIKKNLLGALLFDSGITAEGRRLKRTARRRYTRRRNRILYLQEIFSTEMATLDDAFFQRLDDSFLVPDDKRDSKYPIFGNLVEEKVYHDEFPTIYHLRKHLADSSKKADLRLVYLALAHMIKYRGHFLIEGDFNSKNNDLQKNFQDFLDTYNAIFESDLSLENSKQLEEIVKDKISKSAKKDRILKLFPGEKNSGIFSEFLKLIVGNQADFRKYFNLDEKTSLQFSKESYDEDLETLLGHIGDDYSDVFLKAKKLYDAILLSGILTVTDNGTEAPLSSAMIMRYKEHEEDLALLKAYIRNISLETYNEVFKDNTKNGYAGYIDGKTSQEDFYVYLKRLLAGLEGADYFLEKIDREDFLRKQRTFDNGSIPYQIYLQEMRAILDKQAKFYPFLAKNKERIEKILTFRIPYYVGPLARGNSDFAWSIRKRNEKITPWNFEDVIDKESSAEAFINRMTSFDLYLPEEKVLPKHSLLYENFTVYNELTKVRFIAEGMRDYQFLDSKQKKDIVRLYFKGKRKVTDKDIIEYLHAIDGYDGIELKGIEKQFNSSLSTYHDLLNIINDKEFLDDSSNETIIEEIIHTLTMFEDREMIKQRLSKFDNIFDKSVLKKLSRRHYTGWGKLSAKLINGIRDEKSGNTILDYLIDDGVSNRNFMQLIHDDALSFKKKIKKAQIIGDKDNIKQVVKSLPGSPAIKKGILQSIKIVDELVKVMGREPESIVVEMARENQYTNQGKSNSQQRLKRLEESLKGLGSKILKENVPTRLSKIDNNALQNDRLYLYYLQNGKDMYTGEELDIDRLSNYDIDHIIPQAFLKDDSIDNKVLVSSASNRGKSDDVPSLEVVKKRKTLWYQLLKSKLISQRKFDNLTKAERGGLSQEEKAGFIQRQLVETRQITKHVARLLDERFNNKKDENNRTLRTVKIITLKSSLVSQFRKDFELYKVREINDFHHAHDAYLNAVVASALLKKYPKLEPEFVYGDYPKYNSFRERKSATEKVYFYSNIMNIFKKSIPLADGTVIDRPLIEVNEETGESVWNKVADLNTVRKVLSYSQVNIVKKVEEQNHGLDRGKPKGLFNANLSSKPKPNSKENLVGAKEYLDPKKYGGYAGISNSFAILVKGTIEKGAKKKITNVLEFQGISILDRIYYRKDKLNFLLEKGYKDIELIIELPKYSLFELSDGSRRMLASILSTNNKRGEIHKGNQIFISQKFVKLLYHAKRISSTFNENHRKYVENHKKEFEELFYYILEFNENYVGAKKNGELLKSAFQSWQNHSIDELCSSFIGPTGSERKGLFELTSRGGAADFEFLGVKIPRYRDYTPSSLLKDATLIHQSVTGLYETRIDLGKLGED

SEQ ID NO: 761 - protein, 1392 aa, Streptococcus sanguinis
MENKNYSIGLDIGTNSVGWAVITDDYKVPSKKMKVFGNTDKHFIKKNLIGALLFDEGATAEDRRLKRTARRRYTRRKNRLRYLQEIFSEEISKLDSSFFHRLDDSFLVPKDKRGSKYPIFATLEEEKEYHKKFPTIYHLRKHLADSKEKTDLRLIYLALAHMIKYRGHFLYEESFDIKNNDIQKIFNEFISIYDNTFEGSSLSGQNAQVEAIFTDKISKSAKRERVLKLFSDEKSTSLFSEFLKLIVGNQADFKKHFDLEEKAPLQFSKDTYDEDLENLLGQIGDGFTDLFLVAKKLYDAILLSGILTVTDPSTKAPLSASMIERYESHQKDLAALKQFIKNNLPKRYNEVFSDQSKDGYAGYIDGKTTQEAFYKYIKNLLSKFEGADYFLDKIEREDFLRKQRTFDNGSIPHQIHLQEMNAILRRQGEHYPFLKENREKIEKILTFRIPYYVGPLARGNRDFAWLTRNSDQAIRPWNFEEIVDKASSAEEFINKMTNYDLYLPEEKVLPKHSLLYETFAVYNELTKVKFIAEGLRDYQFLDSGQKKQIVNQLFKEKRKVTEKDIIHYLHNVDGYDGIELKGIEKQFNASLSTYHDLLKIIKDKEFMDDPKNEEILENIVHTLTIFEDREMIKQRLAQYDSIFDEKVIKALTRRHYTGWGKLSAKLINGICDKQTGDTILDYLIDDGKINRNFMQLINDDGLSFKEIIQKAQVVGKTDDVKQVVQELPGSPAIKKGILQSIKIVDELVKVMGYAPESIVIEMARENQTTARGKKNSQQRYKRIEDSLKNLAPGLDSNILKENPTDNIQLQNDRLFLYYLQNGKDMYTGKPLDIDQLSSYDIDHIIPQAFIKDDSIDNRVLTSSKDNRGKSDNVPSLEVVQKRKAFWQQLLDSKLISERKFNNLTKAERGGLDERDKVGFIRRQLVETRQITKHVAQILDASFNTEVNEKNQKIRTVKIITLKSNLVSNFRKEFELYKVREINDYHHAHDAYLNAVVAKAILKKYPKLEPEFVYGDYQKYDLKRYISRFKPSKEIEKATEKYFFYSNLLNFFKEEVHYADGIIVKRENIEYSKDTGEIAWNKEKDFATIKKVLSYPQVNIVKKTEIQTHGLDRGKPKGLFNSNPSPKPSEDSKENLVPIKQGLDPRKYGGYAGISNSYAVLVKAIVEKGAKKQQKTILEFQGISILDKINFENNKENYLLKKRYIEILSTITLPKYSLFEFPDGTRRRLASILSTNNKRGEIHKGNELVLPGKYTTLLYHAKNINKKLEPEHLEYVEKHRNDFAKLLECVLNFNDKYVGALKNGERIRQAFTDWETVDIEKLCFSFIGPENSKNAGLFELTSQGSASDFEFLGVKIPRYRDYAPSSLLKATLIHQSITGLYETRIDLSKLGED

SEQ ID NO: 762 - protein, 1377 aa, Streptococcus sanguinis
MKKPYSIGLDIGTNSVGWAVITDDYKVPSKKMKVLGNTDKHFIKKNLIGALLFDEGTTAEDRRLKRTSRRRYTRRKNRLRYLQEIFSEEISKLDSSFFHRLDDSFLVPEDKRGSKYPIFATLEEEKEYHKKFPTIYHLRKHLADSKEKTDLRLIYLALAHMIKYRGHFLYEESFDIKNNDIQKIFNEFISIYDNTFEGSSLSGQNAQVEAIFTDKISKSTKRERVLKLFSDEKSTGLFSEFLKLIVGNQADFKKHFDLEEKAPLQFSKDTYDEDLENLLGQIGDGFADLFLVAKKLYDAILLSGILTVTDPSTKAPLSASMIERYENHQEDLAALKQFIKNNLSEKYAEVFSDQSKDGYAGFIDGKTTQEAFYKYIKNLLSKLEGADYFLNKIEREDFLRKQRTFDNGSIPHQIHLQEMNAILRRQGEHYLFLKENREKIEKILAFRIPYYVGPLARGNRDFAWLTRNSDQAIRPWNFEEVVDKASSAEDFINKMTNYDLYLPEEKVLPKHSLLYETFAVYNELTKVKFIAEGLRDYQFLDSGQKKQIVNQLFKDKRKVTEKDIIHYLHNVDGYDGIELKGIEKQFNASLSTYHDLLKIIKDKEFMDNPKNGEILENIIHTLTIFEDREMIKQRLAQYDTLFDEKVIKALTRRHYTGWGKLSAKLINGIRDKQTGKTILEYLIDDGDCNRNFMQLINDDGLSFKEIIQKAQVVGKTDDVKQVVQEIPGSPAIKKGILQSIKIVDELVKVMGHNPESIVIEMARENQTTAKGKKNSQQRYKRIEDALKNLAPGLDSNILKENPTDNIQLQNDRLFLYYLQNGKDMYTGKAIDINQLSNYDIDHIIPQAFIKDDSLDNRVLTSSKDNRGKSDNVPSIEVVQKRKAFWQQLLDSKLISERKFNNLTKAKRGGLDERDKVGFIKRQLVETRQITKHVAQLLDTRFNTEVNEENQKIRTVKIITLKSNLVSNFRKEFGLYKVREINDYHHAHDAYLNAVVAKAILKKYPKLEPEFVYGDYQKYDLKRYILKSKASNTIDKATEKYFFYSNLLNFFKEKVRYADGTIKKRENIEYSNDTGEIAWNKEKDFATIKKVLSLPQVNIVKKTEEQTVGQNGGLFDNNIVSKKKVVDASKLIPIKSSLSPEKYGGYARPTIAYSVLVIADIEKGKGKAKKLKRIKEIVGITIQDKKKFESNPVTYLEECGYKNINSNLIIKLPKYSLFEFNDGQRRLLASSIELQKGNELILPYHLTALLYHAQRINKISEPIHKQYVEAHQNEFKELLTTIISLSKKYIQKPNVELLLQQAFDQADKDIYQLSESFISLLKLTSFGAPGAFKFLGVEISQSSVRYKPNSQFLDTTLIHQSITGLYETRIDLSKLGED

SEQ ID NO: 763 - protein, 1370 aa, Streptococcus sanguinis
MKKPYSIGLDIGTNSVGWAVVTDDYKVPAKKMRVFGDTDRSHIKKNLLGTLLFDDGNTAESRRLKRTARRRYTRRRNRILYLQEIFTESMNEIDESFFHRLDDSFLVPEDKRGSKYPIFATLQEEKEYHKQFPTIYHLRKQLADSKEKSDVRLIYLALAHMIKYRGHFLYEETFDIKNNDIQKIFNEFINIYDNTFEGSSLSGQNAQVEAIFTDKISKSAKRERVLKLFPDEKSTGLFSEFLKLIVGNQADFKKHFDLEEKAPLQFSKDTYDEELENLLGQIGDDFADLFLIAKKLYDAILLSGILTVTDPSTKAPLSASMIERYENHQKDLAALKQFIKNNLPEKYVEVFSDQSKDGYAGYIDGKTTQEAFYKYIKNLLSKFEGADYFLDKIEREDFLRKQRTFDNGSIPHQIHLQEMNAILRRQGEHYPFLKENREKIEKILTFRIPYYVGPLARDNRDFSWLTRNSDEPIRPWNFEEVVDKARSAEDFIHRMTNYDLYLPEEKVLPKHSLLYETFAVYNELTKVKFIAEGLRDYQFLDSGQKKQIVNQLFKEKRKVTEKDIIHYLHNVDGYDGIELKGIEKQFNANLSTYHDLLKITKDKEFMDDPKNEEILENIVHTLTIFEDREMIKQRLAQYDTLFDEKVIKALTRRHYTGWGKLSAKLINGIRDKQSGKTILDYLIDDDKINRNFMQLINDDGLSFKEIIQKAQVVGKTDDVKQVVQELPGSPAIKKGILQSIKIVDELVKVMGYALESIVIEMARENQTTARGKKNSQQRYKRIEDALKNLAPGLDSNILKENPTDNIQLKNDRLFLYYLQNGKDMYTGKPLDINQLSSYDIDHIIPQAFIKDDSIDNRVLTSSKDNRGKSDNVPSLEVVQKRKAFWQQLLDSKLISERKFNNLTKAERGGLDERDKVGFIRRQLVETQQITKNVAQILDARFNTEVKEKNQKIRTVKIITLKSNLVSNFRKEFGLYKVREINNYHHAHDAYLNAVVAKAILKKYPKLEPEFVYGDYQKYDLKKYISRFKPSKEIEKATEKYFFYSNLLNFFKEEVLYADGTIRKRENIEYSKDTGEIAWDKEKDFATIKKVLSYPQVNIVKKREVQTGGFSKESILPKGNSDKLIPRKTKDILWDTTKYGGFDSPVIAYSILLIADIEKGKAKKLKTVKTLVGITIMEKAAFEENPITFLENKGYHNVRKENILCLPKYSLFELENGRRRLLASAKELQKGNEIVLPVCLTTLLYHSKNLHKLDEPEHLEYIQKHRNEFKDLLNLVSEFSQKYILAEANLEKIKDLYADNEQADIEILANSFINLLTFTALGAPAAFKFFGKDVDRKRYTTVSEILNATLIHQSITGLYETRIDLSKLGEE

SEQ ID NO: 764 - protein, 1421 aa, Streptococcus sanguinis
MTKFNKNYSIGLDIGVSSVGYAVVTEDYRVPAFKFKVLGNTEKEKIKKNLIGSTTFVSAQPAKGTRVFRVNRRRIDRRNHRITYLRDIFQKEIEKVDKNFYRRLDESFRVLGDKSEDLQIKQPFFGDKELETAYHKKYPTIYHLRKHLADADKNSPVADIREVYMAISHILKYRGHFLTLDKINPNNINMQNSWIDFIESCQEVFDLEISDESKNIADIFKSSENRQEKVKKILPYFQQELLKKDKSIFKQLLQLLFGLKTKFKDCFELEEEPDLNFSKENYDENLENFLGSLEEDFSDVFAKLKVLRDTILLSGMLTYTGATHARFSATMVERYEEHRKDLQRFKFFIKQNLSEQDYLDIFGRKTQNGFDVDKETKGYVGYITNKMVLTNPQKQKTIQQNFYDYISGKITGIEGAEYFLNKISDGTFLRKLRTSDNGAIPNQIHAYELEKIIERQGKDYPFLLENKDKLLSILTFKIPYYVGPLAKGSNSRFAWIKRATSSDILDDNDEDTRNGKIRPWNYQKLINMDETRDAFITNLIGNDIILLNEKVLPKRSLIYEEVMLQNELTRVKYKDKYGKAHFFDSELRQNIINGLFKNNSKRVNAKSLIKYLSDNHKDLNAIEIVSGVEKGKSFNSTLKTYNDLKTIFSEELLDSEIYQKELEEIIKVITVFDDKKSIKNYLTKFFGHLEILDEEKINQLSKLRYSGWGRYSAKLLLDIRDEDTGFNLLQFLRNDEENRNLTKLISDNTLSFEPKIKDIQSKSTIEDDIFDEIKKLAGSPAIKRGILNSIKIVDELVQIIGYPPHNIVIEMARENMTTEEGQKKAKTRKTKLESALKNIENSLLENGKVPHSDEQLQSEKLYLYYLQNGKDMYTLDKTGSPAPLYLDQLDQYEVDHIIPYSFLPIDSIDNKVLTHRENNQQKLNNIPDKETVANMKPFWEKLYNAKLISQTKYQRLTTSERTPDGVLTESMKAGFIERQLVETRQIIKHVARILDNRFSDTKIITLKSQLITNFRNTFHIAKIRELNDYHHAHDAYLAVVVGQTLLKVYPKLAPELIYGHHAHFNRHEENKATLRKHLYSNIMRFFNNPDSKVSKDIWDCNRDLPIIKDVIYNSQINFVKRTMIKKGAFYNQNPVGKFNKQLAANNRYPLKTKALCLDTSIYGGYGPMNSALSIIIIAERFNEKKGKIETVKEFHDIFIIDYEKFNNNPFQFLNDTSENGFLKKNNINRVLGFYRIPKYSLMQKIDGTRMLFESKSNLHKATQFKLTKTQNELFFHMKRLLTKSNLMDLKSKSAIKESQNFILKHKEEFDNISNQLSAFSQKMLGNTTSLKNLIKGYNERKIKEIDIRDETIKYFYDNFIKMFSFVKSGAPKDINDFFDNKCTVARMRPKPDKKLLNATLIHQSITGLYETRIDLSKLGED

SEQ ID NO: 765 - protein, 317 aa, Streptococcus sp.
FEDSILFSYQVDSKFNRKISDATIYATRKAKLDKEKSEETYVLGKIKDIYSQAGYDAFIKIYNKDKSKFLMYHKDPQTFEKVIEEILRTYPSKELNDKNKEIPCNPFEKYRQENGPIRKYSKKSNGPEIKSLKYYDNKLGNHIDITPESSDNQVVLQSLKPWRTDVYFNHQTKKYELMGLKYSDLSFEKGSGKYSISNQKYNSIKRIEGIDEQSEFKFTLYKNDLILIKDSENNEQKLFRFNSRNDTAKHYIELKPYDKAKFDGEQELITILGNVAKGGRCLKGLNKSNISIFKVKTDVLGKKHIIKKEGDEPKLKF

SEQ ID NO: 766 - protein, 1420 aa, Streptococcus sp.
MAKFNKNYSIGLDIGVSSVGYAVVTEDYRVPAFKFKVLGNTEKEKIKKNLIGSTTFVPAQSAQGTRVFRVNRRRIDRRNHRIAYLRDIFQKEIEKIDKNFYRRLDESFRVLGDKSEDIQIKQPFFGNKELETAYHKKYPTIYHLRKHLADADKNSPVADIREVYMVLSHILKYRGHFLTLGKIDPNNINMQNSWIDFIESCQDAFDLEISDESKTIAAIFKSSENRQEKVKQILSYFQQELLKKDKSIFKQLLQLLFGLKTKFKDCFELEEEPDLNFSKENYDENLENLLGALEEDFSDVFAKLKILRDTILLSSMLTYTGATHARFSATMVERYEEHRKDLQRFKSFVKQNLSEQDYLDIFGRKTPTGFDVDKETKGYVGYISNKMVLTNPQKQKTIQQNFYDYISGKITGIEGAECFLNKISDGTFLRKLRTTDNGAIPNQIHAYELEKIIERQGRDYPFLLENKDKLLSILTFKIPYYVGPLAKGNNSRFAWIKRTTSQDVLDDNDEDTRNGKIRPWNYHKLINMDETRDAFIINLIGNDIILLNEKVLPKRSLIYEEVMLQNELTRVKYKDKYGKIHFFNSELRQEIINNLFKTNSKRVSSAMLLSYLENFTNLQAVEIVSGIEKGKSLNSTLKTYNDLKTIFSEELLDSEIYQKELEEIIKVITVFDDKKSIKNYLTKYFGHLEFLNEEKINQLSKLRYTGWGRYSGKLLLGIRDEDTGFNLMQFLRNDDENRNLTQLISDTTLSFDSAIKAIQSKSTVEDDVFEEIKNLAGSPAIKRGILNSIKIVDELVQIIGYPPQNIIIEMARENMTTEEGQKKAKTRKSKLESALKNIEDSVLESGKVPHSDEQLQSEKLYLYYLQNGKDMYSLDKTGSPTPLYRDQLDQYEVDHIIPYSFLPIDSIDNKVLTHRENNQRKLNNIPDKETVANMKPFWEKLYNAKLISQTKYQRLTTSERTPDGVLTESMKAGFIERQLVETRQIIKHVARILDNRFSDTKIITLKSQLVTNFRNTFHIAKIRELNDYHHAHDAYLAVVVGQTLLKAYPKLAPELIYGHHAHFNRHEENKATLRKHLYSNIMRFFNNPDSKVSKDIWDCNRDLPIVKDVIYNSQINFVKRTMIKKGAFYNQNPVGKLNKQIAANNRYPLKTKVSSLDTSIYGGYGPMNSALSIIIIAERFNEKKGKIETVKEFHDIFIIDYEKFNNNPFQFLNNVSEEGFLKKNDLNRVLAFYRISKYSLMQKIDGTRMLFESKSNLHKVTQFKLTKTQNELFFHMKRLLTKSNLMDLKSESAIKESQNFIQTHQNEFDNIADRLSNYSQKMLGETKSLQTLINGYNERPIKQIDNNEETIRYYYDNFIKMFSFVKSGAPKDIINFFNDKYTVPRMRPKPDRKMLDATLIHQSITGLYETRIDLSKLGED

SEQ ID NO: 767 - protein, 1371 aa, Streptococcus sp.
MENKNYSIGLDIGTNSVGWSVITDDYKVPSKKMKVLGNTDKHFIKKNLIGALLFDEGTTAEARRLKRTARRRYTRRKNRLRYLQEIFSEEIGKVDSSFFHRLDDSFLIPEDKRGSKYPIFATLAEEKKYHKQFPTIYHLRKQLADSKEKTDLRLIYLALAHMIKYRGHFLYEEAFDIKNNDIQKIFNEFISIYNNTFEGNSLSGQNVQVEAIFTDKISKSAKRERVLKLFPDEKSTGLFSEFLKLIVGNQADFKKHFDLEEKAPLQFSRDTYDEDLENLLGQIGDDFADLFLVAKKLYDAILLSGILTVTNPSTKAPLSASMIERYENHQKDLASLKQFIKNNLPEKYDEVFSDQSEDGYAGYIDGKTTQETFYKYIKNLLSKFEGADYFLDKIEREDFLRKQRTFDNGSIPHQIHLQEMNAILRRQGEHYPFLKENKEKIEKILTFRIPYYVGPLARGNRDFAWLTRNSDQAIRPWNFEEIVDKASSAEDFINKMTNYDLYLPEEKVLPKHSLLYETFAVYNELTKVKFIAEGLRDYQFLDSGQKKQIVTQLFKEKRKVTEKDIIQFLHNVDGYDGIELKGIEKQFNASLSTYHDLLKIIKDKAFMDDAKNEAILENIVHTLTIFEDREMIKQRLAQYDSLFDEKVIKALTRRHYTGWGKLSAKLINGISDKQTGNTILDYLIDDGEINRNFMQLINDDGLSFKEIIQKAQVVGKTNDVKQVVQELPGSPAIKKGILQSIKIVDELVKVMGHAPESIVIEMARENQTTARGKKNSQQRYKRIEDSLKILASGLNSKILKEHPTDNIQLQNDRLFLYYLQNGKDMYTGEALDINQLSSCDIDHIIPQAFIKDDSLDNRVLTSSKDNRGKSDNVPSLEVVDKMKVFWQQLLDSKLISYRKFNNLTKAERGGLNELDKVGFIKRQLVETRQITKHVAQILDARFNKEVTEKDKKNRTVKIITLKSNLVSNFRKEFELYKVREINDYHHAHDAYLNAVVAKAILKKYPKLEPEFVYGDYQKYDLKRYISRSKDPKEIEKATEKYFFYSNLLNFFKEEVHYADGTIVKRENIEYSKDTGEIAWNKEKDFATIKKVLSLPQVNIVKKREVQTGGFSKESILPKGNSDKLIPRKTKDILWDTTKYGGFDSPVIAYSILLIADIEKGKAKKLKTVKTLVGITIMEKDAFEKNPIAFLENKGYHNVCKENILCLPKYSLFELENGRRRLLASAKELQKCNEIVLPVYLTTLLYHSKNVHKLDEPGHLEYIQKHRNEFKDLLNLVSEFSQKYVLADANLEKIKNLYADNEQADIEILANSFINLLTFTALGAPAAFKFFGKDVDRKRYTTVSEILNATLIHQSITGLYETRIDLSKLGED

SEQ ID NO: 768 - protein, 93 aa, Streptococcus sp.
MILIKDSENNEQKLFRFNSRNDTAKHYVELKPYDKARFDGQQELITILGNVAKGGQCLKGLNKSNISIFKVKTDVLGKKHIIKKEGDEPKLKF

SEQ ID NO: 769 - protein, 1121 aa, Streptococcus sp.
MNGLVLGLDIGIASVGVGILEKNSGKIIHANSRLFPAATADNNVERRKNRQARRLHRRKKHRGVRFQDLFEDYGLLTDFSKVSINLNPYRLRVDGLNQQLTNEELFIALKNIVKRRGISYLDDASEDGGTVSSDYGKAVEENRKLLAEQTPGQIQLERFEKYGQVRGDFTVVENGEKRRLINVFSTSAYRKEAERILRKQQEFNSKITDEFIEDCLKILTGKRKYYHGPGNEKSRTDYGRFRTDGTTLDNIFGILIGKCTFYPDEYRASKASYTAQEFNLLNDLNNLTVPTETKKLSEEQKKVIVEYAKEAKTLGASTLLKYIAKMIDASVDQIRGYRVDVNNKPEIHTFEAYRKMQSLETISVGELSRNVLDELAHILTLNTEREGIEEAINTKLKDSFSQDQVLELVQFRKNNSSLFSKGWHNFSLKLMMELIPELYETSEEQMTILTRLGKQKSKEISKRTKYIDEKELTEEIYNPVVAKSVRQAIKIINEATKKHGIFDNIVIEMARENNEEDAKKDYIKRQKANQDEKNAAMEKAAFQYNGKKELPDSIFHGQKELATKIRLWHQQGEKCLYTGKNIPISDLIHNQYKYEIDHILPLSLSFDDSLSNKVLVLATANQEKGQRTPFQALDSMDDAWSYREFKSYVKESKLLGNKKKEYLLTEEDISKIEVKQKFIERNLIDTRYSSRVVLNALQDFYKAHKFDTTISVVRGQFTSQLRRKWGLEKSRETYHHHAVDALIIAASSQLRLWKKQNNPLIAYKEGQFVDSETGEIISLSDDEYKELVFKAPYDHFVDTLSSKTFEDSILFSYQVDSKFNRKISDATIYATRKAKLDKEKSEETYVLGKIKDIYSQAGYDAFIKIYNKDKSKFLMYHKDPQTFEKVIEEILRTYPSKELNDKNKEIPCNPFEKYRQENGPIRKYSKKSNGPEIKSLKYYDNKLGNHIDITPESSDNQVVLQSLKPWRTDVYFNHQTKKYELMGLKYSDLSFEKGSGKYSISNQKYNSIKRIEGIDEQSEFKFTLYKNDLILIKDSENNEQKLFRFNSRNDTAKHYIELKPYDKAKFDGEQELITILGNVAKGGRCLKGLNKSNISIFKVKTDVLGKKHIIKKEGDEPKLKF

SEQ ID NO: 770 - protein, 1026 aa, Streptococcus sp.
MNGLVLGLDIGIASVGVGILEKNSGKIIHANSRLFPAATADNNVERRKNRQARRLNRRKKHRGVRFQDLFEDYGLLTDFSKVSINLNPYRLRVDGLNQQLTNEELFIALKNIVKRRGISYLDDASEDGGAVSSDYGKAVEENRKLLAEQTPGQIQLERFEKYGQVRGDFTVVENGEKRRLINVFSTSAYRKEAEKILRKQQEFNNQITDEFIEDYLKILTGKRKYYHGPGNEKSRTDYGRFRTDGTTLDNIFGVLIGKCTFYPNEYRASKSSYTAQEFNLLNDLNNLTVPTETKKLSEEQKKVIVEYAKEAKTLGASTLLKYIVKMIDASVDQISGYRVDVNNKPEMHTFEVYRKMQSLETISVGELSRNVLDELAHILTLNTEREGIEEAINSKLMGVFSQDQVLELVQFRKNNSSLFSKGWHNFSLKLMMELIPELYETSEEQMTILTRLGKQKSKETSKRTKYIDEKELTEEIYNPVVAKSVRQAIKIINEATKKHGIFDNIVIEMARENNEEDAKKDYIKRQKANQDEKNAAMEKAAFQYNGKKELPGNIFNGHKELATKIRLWHQQGEKCLYTGKTIPISDLIHNQYKYEIDHILPLSLSFDDSLSNKVLVHATANQEKGQRTPFQALDSMDDAWSYREFKSYVKDLKSLSNKKKDYLLTEEDISKIEVKQKFIERNLVDTRYSSRVVLNALQDFYKSHQFDTTISVVRGQFTSQLRRKWGLEKSRETYHHHAVDALIIAASSQLRLWKKQNNPLITYKEGQFIDSQTGEIISLTDDEYKELVFKAPYDHFVDTLHSKTFEDGILFSYQVDSKYNRKISDATIYATRKAKLDKDKSEETYVLGKIKDIYSQAGYDAFIKIYNKDKRKFLMYHKDPQTFEKVIEEILRTYPSKERNDKNKEVPCNPFEKYRQENGPIRKYSKKGNGPEIKCLKYYDNKLGNYIDISPDGSDNQVVLQSLKPWRTDVYFNHQTKKYELMGLKYSDLSFEKGSGKYSISNEKYNSIKRIEGVNEQSEFKFTLYK

SEQ ID NO: 771 - protein, 1377 aa, Streptococcus sp.
MNNKPYSIGLDIGTNSVGWSVITDDYKVPSKKMKVLGNTDKRFIKKNLIGALLFDEGTTAEARRLKRTARRRYTRRKNRLRYLQEIFAEEMSKVDSSFFHRLDDSFLIPEDKRGSKYPIFATLVEEKEYHKQFPTIYHLRKQLADSKEKADLRLIYLVLAHMIKYRGHFLYEEAFDIKNNDIQKIFNEFISIYDNTFEGSSLSGQNAQVETIFTDKISKSAKRERVLKLFPDEKSTGLFSEFLKLIVGNQADFKKHFDLEEKAPLQFSKDTYDEDLENLLEQIGDDFADLFVAAKKLYDAILLSGILTVTDPSTKAPLSASMIERYENHQKDLAVLKQFIKTNLPEKYVEVFSDQSKDGYAGYIDGKTTQEAFYKYIKNLLSKFDGADYFLDKIEREVFLRKQRTFDNGSIPHQIHLQEMNTILRRQGEHYPFLKENKEKIEKILTFRIPYHVGPLARGNRDFAWLTRNSDQAIRPWNFEEIVDKASSAEDFINKMTNYDLYLPEEKVLPKHSLLYETFAVYNELTKVKFIAEGMRDYQFLDSGQKKKIINQLFKKKRKVTEDDIIDCLQKIDNYDGIELKGIEKQFNASLSTYHDILKIIRDKEFMDDPKNGDILENVIHTLTIFEDREMIKQRLAQYNSIFDEKVIKALSRKHYTGWGKLSAKLIDGIRDKQTGKTILDYLMDDGKSNRNFMQLIKDDELSFTEIIQKAQVVGDTDNLRQVVQNLPGSPAIKKGILQSIKIVDELVKVMGHAPESIVIEMARENQTTARGKKNSQQRYKRIEDSLKNLASGLDSNILKENPTDNIQLQNDRLFLYYLQNGKDMYTGEALNINQLSSYDIDHIIPQAFIKDDSLDNRVLTSSKDNRGKSDNVPSLEVVEKMKAFWQQLLDSKLISERKYNNLTKAERERGGLNELDKVGFIKRQLVETRQITKHVAQILDARFNKEVTEKNKKNRNVKIITLKSNMVSNFRKEFGLYKVREINDYHHAHDAYLNAVVAKAILKKYPKLEPEFVYGDYQKYDLKRYISRSKDPKEVEKATEKYFFYSNLLNFFKEEVHYADGTIVKRENIEYSKDTGEIAWNKEKDFATIKKVLSLPQVNIVKKTEEQTVGQNGGLFDNNIVSKKKVVDASKLIPIKSGLSPEKYGGYARPTIAYSVLVTYKQNNKIKNTMVGIPVLTKLEFERDPNLYLRNLGINNVSHVIKLVKYTVLEFKHKYGTYRRFIVSNQELKRANQIFVTTKQMKLISQYTTLDKNEHDSLLKNNQQLIQSIWNQFLEFMLATDLVNKKQYDELILTNNQTIEECRNIMNRVITTLSFTNINAGQKKIIFDDTLSLPIKRWQFTDSDKMVKKIIESTLIHQSITGLYETRIDLSKLGED

SEQ ID NO: 772 - protein, 1371 aa, Streptococcus sp.
MNNNNYSIGLDIGTNSVGWAVITDDYKVPSKKMRVLGNTDKRFIKKNLIGALLFDEGTTAEDRRLKRTARRRYTRRKNRLRYLQEIFAEEMSKVDSSFFHRLDDSFLVPEDKSGSKYPIFATLAEEKEYHKKFPTIYHLRKHLADSKEKADLRLIYLALAHITKYRGHFLYEEAFDIKNNDIQKIFNEFINIYDNTFEGSSLSGQNAQVEAIFTGKISKSVKREHVLKLFPDEKSTGLFSEFLKLIVGNQADFKKHFDLEEKASLQFSKDTYDEDLENLLGQIGDDFADLFLVAKKLYDAILLSGILTVTDPSTKAPLSASMIERYENHQEDLAALKQFIKNNLPEKYAEVFSDQSKDGYAGYIDGKTTQEAFYKYIKNLLSKFEGADYFLDKIEREDFLRKQRTFDNGSIPHQIHLQEMNAILRRQGEHYPLLKENKEKIEKILTFRIPYYVGPLARGNRDFAWLTRNSDQAIRPWNFEEIVDKASSAESFINKMTNYDLYLPEEKVLPKHSLLYETFAVYNELTKVKFIAEGLRDYQFFDSGQKKQIVNQLFKEKRKVTEKDIIHYLHNVDGYDGIELKGIEKQFNASLSTYHDLLKIIKDKEFMDNHKNQEILENIVHTLTIFEDREMIKQRLAQYDSIFDEKVIKALTRRHYTGWGKLSAKLINGICDKKTGKTILDYLIDDGYNNRNFMQLINDDGLSFKEIIQKAQVVGKTDDLTQVVRELSGSPAIKKGILQSIKIVDELVKIMGYAPESIVIEMARENQTTAKGKKNSQQRYKRIEDALKNLAPGLDSTISKENPTDNIQLQNDRLFLYYLQNGKDMYTGEALDINQLSSYDIDHIIPQAFIKDDSLDNRVLTSSKDNRGKSDNVPSLEVVKKRKAFWQQLLDSKLISERKFNNLTKAERGGLDERDKVGFIKRQLVETRQITKHVARILDARFNTEVSEKNQKIRSVKIITLKSNLVSNFRKEFKLYKVREINDYHHAHDAYLNAVVAKAILKKYPKLEPEFVYGDYQKYDLKRYISKSKDPKEVEKATEKYFFYSNLLNFFKEEVHYADGTIVKRENIEYSKDTGEIAWNKEKDFVTIKKVLSYPQVNIVKKREVQTGGFSKESILPKGNSDKLIPRKTKDILWDTTKYGGFDSPVIAYSILLIADIEKGKAKKLKTVKTLVGITIMEKAAFEKNPITFLENKGYHNVRKENILCLPKYSLFELENGRRRLLASAKELQKGNEIVLPVYLTTLLYHSKNVHKLDEPEHLEYIQKHRYEFKDLLNLVSEFSQKYVLAEANLEKIKSLYVDNEQADIEILANSFINLLTFTALGAPAAFKFFGKDVDRKRYTTVSEILNATLIHQSITGLYETRIDLSKLGED

SEQ ID NO: 773 - protein, 1139 aa, Streptococcus sp.
MSDLVLGLDIGIGSVGVGILNKVTGEIIHKNSRIFPAAQAENNLERRTNRQGRRLTRRKKHRRVRLNHLFEESGLITDFTKVSINLNPYQLRVKGLTAELSNEELFIALKNMVKHRGISYLDDASDDGNSSVGDYAQIVKENSKQLETKTPGQIQLERYQKYGQLRGDFTVEEDGRKHRLINVFPTSAYHAEALRILQTQQEFNPQITDEFINSYLEILTGKRKYYHGPGNEKSRTDYGKYTTKKDAQGQYITLNNIFGILIGKCTFYPEEYRAAKASYTAQEFNLLNDLNNLTVPTETKKLSEEQKYQIITYVKNEKAMGPAKLFKYIAKLLSCDVADIKGYRIDKSDKAEIHTFEAYRKMKTLETLDVKKMAREELDKLAYVLTLNTEREGIQEALDHEFADGTFSQEQVDELVQFRKANSSIFGKGWHSFSVKLMMELIPELYATSEEQMTILTRLGKQKTTSSSNKTKYIDEKQLTEEIYNPVVAKSVRQAIKIVNAAIKKYGDFDNIVIEMARETNEDDEKKAIQKIQKANKAEKDAAMRKAANQYNGKAELPHSVFHGHKQLATKIRLWHQQGERCLYTGKTISIHDLINNPNQFEIDHILPLSITFDDSLANKVLVYATANQEKGQRTPYQALDSMDDAWSFRELKAFVRESKALSNKKKEYLLTEEDISKFDVRKKFIERNLVDTRYASRVVLNALQEHFRTHKIDTKVSVVRGQFTSQLRRHWGIEKTRDTYHHHAVDALIIAASSQLNLWKKQKNTLVSYSEDQLLDIETGELISDDEYKESVFKAPYQHFVDTLKSKEFEDSILFSYQVDSKFNRKISDATIYATRKAKLDKEKKEYTYTLGKIKDIYALGTKTPSKTGFYKFLDLYKKDKSQFLMYQKDRRTWDEVIEKILEQYRPFKEKDKNGKEVDFNPFEKYRIENGPIRKYSRKGNGPEIKSLKYYDNLLGRFVDITPSESKNPVALLSLNPWRTDVYYNTETRKYEFLGLKYADLCFEKGGSYGISKVKYNKIREKEGIGKNSEFKFTLYKNDLILIKDTETNRQQIFRFWSRTGKDNPKSFEKHKLELKPYEKTRFEKGEELKVLGKVPPSSNRLQKNMQIENLSIYKVRTDVLGNQHIIKNEGDKPKLDF

SEQ ID NO: 774 - protein, 1375 aa, Streptococcus sp.
MSNKSYSIGLDIGTNSVGWAVITDDYKVPSKKMKVLGNTDKHFIKKNLIGALLFDEGTTAEDRRLKRTARRRYTRRKNRLRYLQEIFSQEISKVDSSFFHRLDDFFLVPEDKRGSKYPIFATLVEEKEYHKKFPTIYHLRKHLADSKEKTDLRLIYLALAHMIKYRGHFLYEESFDIKNNDIQKIFSEFISIYDNTFEGKSLSGQNAQVEAIFTDKISKSTKRERVLKLFPDEKSTGLFSEFLKLIVGNQADFKKHFDLEEKAPLQFSKDTYDEDLENLLGQIGDDFADLFLVAKKLYDAILLSGILTVKDLSTKAPLSASMIERYENHQKDLAALKQFIQNNLQEKYDEVFSDQSKDGYAGYIDGKTTQEAFYKYIKNLLSKFEGADYFLDKIEREDFLKKQRTFDNGSIPHQIHLQEMNAIIRRQGEHYPFLQENKEKIEKILTFRIPYYVGPLARGNGDFAWLTRNSDQAIRPWNFEEIVDQASSAEDFINKMTNYDLYLPEEKVLPKHSLLYETFAVYNELTKVKFIAEGLTRYQFLDKKQKKDIFDTFFKAENKRKVTEKDIIHYLHNVDGYDGIELKGIEKQFNASLSTYHDLLKIIKDKAFMDDSKNEEILENIIHTLTIFEDREMIKQRLAQYDSLFDEKVIKALTRRHYTGWGKLSAKLINGIRDKKSGKTILDYLIDDGEINRNFMQLIHDDGLSFKEIIQKAQVFGKTNDVKQVVQELPGSPAIKKGILQSIKIVDELVKVMGHAPESIVIEMARENQTTARGKKNSQQRYKRIEDSLKNLASGLDSNILKENPTDNIQLQNDRLFLYYLQNGRDMYTGKPLEINQLSNYDIDHIIPQAFIKDDSLDNRVLTSSKDNRGKSDNVPSLEVVEKMKAFWQQLLDSKLISERKFNNLTKAERERGGLNELDKVGFIKRQLVETRQITKHVAQFLDARFNKEVTEKDKKNRNVKIITLKSNLVSNFRKEFGLYKVREINDYHHAHDAYLNAVLAKAILKKYPKLEPEFVYGDYQKYDLQRYISKSREPKEVEKATQKYFFYSNLLNFFKEEVHYADGTIVKRENIEYSKDTGEIAWNKEKDFATVKKVLSLPQVNIVKKTEVQTGGFSKESILPKGNSDKLIPRKTKEILWDTTKYGGFDSPVIAYSILLIADIEKGKAKKLKTVKTLVGITIMEKATFEKNPITFLENKGYHNVRKENILCLPKYSLFELESGRRRMLASAKELQKGNEIVLPVYLTTLLYHSKNVHKLDEPEHLEYIQKHRYEFKDLLNLVSEFSQKYVLADANLEKIKNLYADNEQADIEILANSFINLLTFTALGAPAAFKFLGKDVDRKRYTTVSEILNATLIHQSITGLYETRIDLSKLGED

SEQ ID NO: 775 - protein, 206 aa, Streptococcus sp.
RTPFQALDSMDDAWSYREFKSYVKESKLLGNKKKEYLLTEEDISKIEVKQKFIERNLIDTRYSSRVVLNALQDFYKAHKFDTTISVVRGQFTSQLRRKWGLEKSRETYHHHAVDALIIAASSQLRLWKKQNNPLIAYKEGQFVDSETGEIISLSDDEYKELVFKAPYDHFVDTLSSKTFEDSILFSYQVDSKFNRKISDATIYATR

SEQ ID NO: 776 - protein, 1122 aa, Streptococcus suis
MSNGKILGLDIGIASVGVGVIDAQTGEIIHASSRIFPSANAANNAERRTFRGSRRLIRRKKHRIKRLDDLFNDFHINLDGEMSTDNPYVLRVKGLSQKLTVEELYISIKNIMKRRGISYLDDAESDNEAGRSDYAKAIERNRQLLTSKTPGEIQLERLEKYGQLRGNFTIIDEEGQSQQIINVFSTSDYVKEVEKILDCQKMYHKFISDEFCDKLIELLREKRKYYVGPGNEKSRTDYGIYRTDGTTLENLFGILIGKCTFYPDQYRSSRASYTAQEFNFLNDLNNLTVPTETKKLSQEQKEFLVNYAKETSVLGAGKILQQIAKLADCKVEDIRGYRLDNKDKPELHTFETYRAMKGLVPLVDIGVLSREQLDILADILTLNTDFEGIREALKKQLPNVFDEKQVKGLASFRKSKSQLFAKGWHNLSQKIMLEVIPELYATSDEQMTILTRLGKFEKSSVAEYPSSINVDEITDEIYNPVVAKSIRQTIKIINASIKKWDEFDQIVIEMPRDRNEDEEKKRIADGQKANAKEKADSILRAAELYCAGKVLPDYVYNGHNQLATKIRLWYQQGERCIYTGQPISIHDLIHNQNQYEIDHILPLSLTFDDSLSNKVLVLATANQEKAQRTPYNYLKSATSAWSYREFKDYVTKRKGIGKKKCEYLTFEEDINGFEVRSKFIQRNLVDTRYASKVILNALQDYFKISGIQTKVSVVRGQFTSQLRHKWGIEKTRETYHHHAVDALIIAASSQLRLWKKQESPLVVDYQEGRQVDLETGEILELTDEQYKELVYQPPYQGFVNTISSSAFDNEILFSYQVDSKVNRKISDATIYATRNAQLGKDKTEGIYVLGKIKDIYTQAGYEAFLKRYTKDKTSFLMYHKDLDTWEKVIEIILRDYREYDEKGKEIGNPFERYRRENGYVKKYSRKGNGTAIKSLKYYDNKLGNHIDITPENSRNAVVLQSLKPWRTDVYFNKETGKYEFLGIKYSDLSFEKGTGEYGISQEKYDSIKIAEGVAKKSIFKFTLYKQDLLFIKDIENNFGKLLRFTSKNDTSKHYVELKPYDKNKFGTEEPLLPVLGNVAKSGQCIKGLNKSNISIYKVRTDILGYRHFIKQEGEHPQLKFKK

SEQ ID NO: 777 - protein, 1381 aa, Streptococcus suis
MVKKKYAIGIDIGTNSVGWSIVTDDYKVPSKKMKVFGNTEKRYIKKNLLGTLLFDEGNTAENRRLKRTARRRYTRRRNRILYLQEIFAEEINKIDDSFFQRLDDSFLIVEDKQGSKHPIFGTLQEEKEYHKQFPTIYHLRKQLADSSQKADIRLIYLALAHIIKYRGHFLFEGDLKSENKDVQHLFNDFVEMFDKTVEGSYLSENLPNVADVLVEKVSKSRRLENILHYFPNEKKNGLFGNFLALALGLQPNFKTNFELAEDAKIQFSKETYEEDLEELLGKIGDDYADLFIATKSLYDGILLAGILSTTDSTTKAPLSSSMVNRYEEHQKDLALLKNFIHQNLSDSYKEVFNDKLKDGYAGYIEGKTTQENFYRFIKKAIEKIEGSNYFIDKIDREDFLRKQRTFDNGSIPHQIHLQEMHAIIRRQAEFYPFLVENQDKIEKILTFRIPYYVGPLARGKSEFAWLNRKSDEKIRPWNFDEMVDKETSAENFITRMTNYDRYLPDQKVLPKHSLLYEKFAVYNELTKVKFIAEGMRDYQFLDSGQKKDIVKTLFKTKRKVTAKDIKAYLENSNGYAGVELKGLEEQFNASLPTYHDLLKILRDKAFIDAEENQEILEDIVLTLTLFEDREMIRKRLEKYKDILTEEQRKKLERRHYTGWGRLSAKLINGILDKVTRKTILGYLIDDGTSNRNFMQLINDDTLSFVDEIRLAQGSGEAEDYRAEVQNLAGSPAIKKGILQSLKIVDELIEVMGYEPEHIVVEMARENQFTNQGRRNSQQRINRLENALKDFGSKILEEQKPYGVSKVNNIHLQSDRLFLYYLQNGKDMYTDEELDIDHLSEYDIDHIIPQAFIKDDSLDNKVLTKSAKNRGKSDDVPSMEIVHNRKNFWRQLLKSKLISQRKFDNLTKAERGGLTNEDKARFIQRQLVETRQITKHVARMLDTRFNTKLDEAGNRIRDPKVNIITLKSNLVSQFRKDYQLYKIREINNYHHAHDAYINAVVATALLKKYPQLAPEFVYGEYPTYNSYNSRKSATEKVLFYSNIMNFFKRIVVHSKTGEVRIRPVIEVNKETGEIVWDKKSDFRTVRKVLSYPQVNVVKKTEVQNHGLDRGKPKGFYNANLSPRPKEGSVENLVPAKQSFDTKRYGGYAGISNSYAVLVNGIIEKGKKKSKAEVTEFQGISILARKDFDKNPKQYLLNLGYKDIKSIIKLPKYSLFELENGSRRMLASILSTNNKRGEIHKGNEMYLPDKFVTLLYHAMRVNRTLEPGHKKYVETHRHVFDELLIYILEYNEKIVGAKANGKRIVEAYSARKDTDNLEELCNSFINLLNLTALGSAVDFEFLGTKIPRYRDYTPSSLLKATLIHQSVTGLYETRIDLSKLGGD

SEQ ID NO: 778 - protein, 39 aa, Streptococcus thermophilus
GRCIKGLGKSNISIYKVRTDVLGNQHIIKNEGDKPKLDF

SEQ ID NO: 779 - protein, 302 aa, Streptococcus thermophilus
MIRRKKHRIVRLNRLFEESGLITDFTKISINLNPYQLRVKGLTDELSNEELFIALKNMVKHRGISYLDDASDDGNSSVGDYAQIVKENSKQLETKTPGQIQLERYQTYGQLRGDFTVEKDGKKHRLINVFPTSAYRSEALRILQTQQEFNPQITDEFINRYLEILTGKRKYYHGPGNEKSRTDYGRYRTSGETLDNIFGILIGKCTFYPDEFRAAKASYTAQEFNLLNDLNNLTVPTETKKLSKEQKNQIINYVKNEKAMGPAKLFKYIAKLLSCDVADIKGYRIDKSGKAERFILSKPIEK

SEQ ID NO: 780 - protein, 1121 aa, Streptococcus thermophilus
MSDLVLGLDIGIGSVGVGILNKVTGEIIHKNSRIFPAAQAENNLVRRTNRQGRRLTRRKKHRIVRLNRLFEESGLITDFTKISINLNPYQLRVKGLTDELSNEELFIALKNMVKHRGISYLDDASDDGNSSVGDYAQIVKENSKQLETKTPGQIQLERYQTYGQLRGDFTVEKDGKKHRLINVFPTSAYRSEALRILQTQQEFNPQITDEFINRYLEILTGKRKYYHGPGNEKSRTDYGRYRTSGETLDNIFGILIGKCTFYPDEFRAAKASYTAQEFNLLNDLNNLTVPTETKKLSKEQKNQIINYVKNEKAMGPAKLFKYIAKLLSCDVADIKGYRIDKSGKAEIHTFEAYRKMKTLETLDIEQMDRETLDKLAYVLTLNTEREGIQEALEHEFADGSFSQKQVDELVQFRKANSSIFGKGWHNFSVKLMMELIPELYETSEEQMTILTRLGKQKTTSSSNKTKYIDEKLLTEEIYNPVVAKSVRQAIKIVNAAIKEYGDFDNIVIEMARETNEDDEKKAIQKIQKANKDEKDAAMLKAANQYNGKAELPHSVFHGHKQLATKIRLWHQQGERCLYTGKTISIHDLINNSNQFEVDHILPLSITFDDSLANKVLVYATANQEKGQRTPYQALDSMDDAWSFRELKAFVRESKTLSNKKKEYLLTEEDISKFDVRKKFIERNLVDTRYASRVVLNALQEHFRAHKIDTKVSVVRGQFTSQLRRHWGIEKTRDTYHHHAVDALIIAASSQLNLWKKQKNTLVSYSEDQLLDIETGELISDDEYKESVFKAPYQHFVDTLKSKEFEDSILFSYQVDSKFNRKISDATIYATRQAKVGKDKADETYVLGKIKDIYTQDGYDAFMKIYKKDKSKFLMYRHDPQTFEKVIEPILENYPNKQMNEKGKEVPCNPFLKYKEEHGYIRKYSKKGNGPEIKSLKYYDSKLGNHIDITPKDSNNKVVLQSVSPWRADIYFNNTTGKYEILGLKYADLQFEKGTGTYKISQEKYNDIKKKEGVDSDSEFKFTLYKNDLLLVKETETKEQQLFRFLSRTMPKQKHYVELKPYDKQKFEGGEALIKVLGNVANGGQCIKGLGKSNISIYKVRTDVLGNQHIIKNEGDKPKLDF

SEQ ID NO: 781 - protein, 1121 aa, Streptococcus thermophilus
MSDLVLGLDIGIGSVGVGILNKVTGEIIHKNSRIFPAAQAENNLVRRTNRQGRRLTRRKKHRIVRLNRLFEESGLITDFTKISINLNPYQLRVKGLTDELSNEELFIALKNMVKHRGISYLDDASDDGNSSVGDYAQIVKENSKQLETKTPGQIQLERYQTYGQLRGDFTVEKDGKKHRLINVFPTSAYRSEALRILQTQQEFNPQITDEFINRYLEILTGKRKYYHGPGNEKSRTDYGRYRTSGETLDNIFGILIGKCTFYPDEFRAAKASYTAQEFNLLNDLNNLTVPTETKKLSKEQKNQIINYVKNEKAMGPAKLFKYIAKLLSCDVADIKEYRIDKSGKAEIHTFEAYRKMKTLETLDIEQMDRETLDKLAYVLTLNTEREGIQEALEHEFADGSFSQKQVDELVQFRKANSSIFGKGWHNFSVKLMMELIPELYETSEEQMTILTRLGKQKTTSSSNKTKYIDEKLLTEEIYNPVVAKSVRQAIKIVNAAIKEYGDFDNIVIEMARETNEDDEKKAIQKIQKANKDEKDAAMLKAANQYNGKAELPHSVFHGHKQLATKIRLWHQQGERCLYTGKTISIHDLINNSNQFEVDHILPLSITFDDSLANKVLVYATANQEKGQRTPYQALDSMDDAWSFRELKAFVRESKTLSNKKKEYLLTEEDISKFDVRKKFIERNLVDTRYASRVVLNALQEHFRAHKIDTKVSVVRGQFTSQLRRHWGIEKTRDTYHHHAVDALIIAASIQLNLWKKQKNTLVSYSEDQLLDIETGELISDDEYKESVFKAPYQHFVDTLKSKEFEDSILFSYQVDSKFNRKISDATIYATRQAKVGKDKADETYVLGKIKDIYTQDGYDAFMKIYKKDKSKFLMYRHDPQTFEKVIEPILENYPNKQINEKGKEVPVNPFLKYKEEHGYIRKYSKKGNGPEIKSLKYYDSKLGNHIDITPKDSNNKVVLQSVSPWRADVYFNKTTGKYEILGLKYADLQFEKGTGTYKISQEKYNDIKKKEGVDSDSEFKFTLYKNDLLLVKDTETKEQQLFRFLSRTMPKQKHYVELKPYDKQKFEGGEALIKVLGNVANSGQCKKGLGKSNISIYKVRTDVLGNQHIIKNEGDKPKLDF

SEQ ID NO: 782 - protein, 1121 aa, Streptococcus thermophilus
MSDLVLGLDIGIGSVGVGILNKVTGEIIHKNSRIFPAAQAENNLVRRTNRQGRRLTRRKKHRRVRLNRLFEESGLITDFTKISINLNPYQLRVKGLTDELSNEELFIALKNMVKHRGISYLDDASDDGNSSVGDYAQIVKENSKQLETKTPGQIQLERYQTYGQLRGDFTVEKDGKKHRLINVFPTSAYRSEALRILQTQQEFNPQITDEFVNRYLEILTGKRKYYHGPGNEKSRTDYGRYRTNGETLDNIFGILIGKCTFYPEEFRAAKASYTAQEFNLLNDLNNLTVPTETKKLSKEQKNQIINYVKNEKAMGPAKLFKYIAKLLSCDVADIKGYRIDKSGKAEIHTFEAYRKMKTLETLDIEQMDRETLDKLAYVLTLNTEREGIQEALEHEFADGSFSQKQVDELVQFRKANSSIFGKGWHNFSVKLMMELIPELYETSEEQMTILKRLGKQKTTSSSNKTKYIDEKLLTEEIYNPVVAKSIRQAIKIVNAAIKEYGDFDNIVIEMARETNEDDEKKAIQKIQKANKDEKDAAMLKAANQYNGKAELPHSVFHGHKQLATKIRLWHQQGERCLYTGKTISIHDLINNPNQFEVDHILPLSITFDDSLANKVLVYATANQEKGQRTPYQALDSMDDAWSFRELKAFVRESKTLSNKKKEYLLTEEDISKFDVRKKFIERNLVDTRYASRVVLNALQEHFRAHKIDTKVSVVRGQFTSQLRRHWGIEKTRDTYHHHAVDALIIAASSQLNLWKKQKNTLVSYSEDQLLDIETGELISDDEYKESVFKAPYQHFVDTLKSKEFEDSILFSYQVDSKFNRKISDATIYATRQAKVGKDKKDETYVLGKIKDIYTQDGYDAFMKIYKKDKSKFLMYRHDPQTFEKVIEPILENYPNKEMNEKGKEVPCNPFLKYKEEHGYIRKYSKKGNDPEIKSLKYYDSKLGNHIDITPKDSNNKVVLQSVSPWRADVYFNKTTGKYEILGLKYADLQFEKGTGTYKISQEKYNDIKKKEGVDSDSEFKFTLYKNDLLLVKDTETKEQQLFRFLSRTMPKQKHYVELKPYDKQKFEGGEALIKVLGNVANSGQCKKGLGKSNISIYKVRTDVLGNQHIIKNEGDKPKLDF

SEQ ID NO: 783 - protein, 1122 aa, Streptococcus thermophilus
MSDLVLGLDIGIGSVGVGILNKVTGEIIHKNSRIFPAAQAENNVERRTNRQGRRLTRRKKHRRVRLNRLFEESGLITDFTKISINLNPYQLRVRGLTDELSNEELFIALKNMVKHRGISYLDDASDDGNSSVGDYAQIVKENSKQLETKTPGQIQLERYQTYGQLRGDFTVEKDGKKHRLINVFPTSAYRSEALRILQTQQEFNSQITDEFINRYLEILTGKRKYYHGPGNEKSRTDYGRYRTSGETLDNIFGILIGKCTFYPEEFRAAKASYTAQEFNLLNDLNNLTVPTETKKLSKEQKNQIINYVKNEKAMGPAKLFKYIAKLLSCDVADIKGYRIDKSGKAEIHTFEAYRKMKTLETLDIEQMDRETLDKLAYVLTLNTEREGIQEALEHEFADGSFSQKQVDELVQFRKASSSIFGKGWHNFSVKLMMELIPELYETSEEQMTILTRLGKQKTTSSSNKTKYIDEKLLTEEIYNPVVAKSVRQAIKIVNAAIKEYGDFDNIVIEMARETNEDDEKKAIQKIQKANKDEKDAAMLKAANQYNGKAELPHSVFHGHKQLATKIRLWHQQGERCLYTGKTISIHDLINNPNQFEVDHILPLSITFDDSLANKVLVYATANQEKGQRTPYQALDSMDDAWSFRELKAFVRESKTLSNKKKEYLLTEEDISKFDVRKKFIERNLVDTRYASRVVLNALQEHFRAHKIDTKVSVVRGQFTSQLRRHWGIEKTRDTYHHHAVDALIIAASSQLNLWKKQKNTLVSYSEDQLLDIETGELISDDEYKESVFKAPYQHFVDTLKSKEFEDSILFSYQVDSKFNRKLSDATIYATRQAKVGKDKKDETYVLGKIKDIYTQDGYDAFMKIYKKDKSKFLMYRHDPQTFEKVIEPILENYPNKEMNEKGKEVPCNPFLKYKEEHGYIRKYSKKGNGPEIKSLKYYDSKLLGNPIDITPENSKNKVVLQSLKPWRADVYFNKTTGKYEILGLKYADLQFEKKTGTYKISQEKYNGIMKEEGVDSDSEFKFTLYKNDLLLVKDTETKEQQLFRFLSRTMPNVKYYVELKPYSKDKFEKNESLIEILGSADKSGRCIKGLGKSNISIYKVRTDVLGNQHIIKNEGDKPKLDF

SEQ ID NO: 784 - protein, 1388 aa, Streptococcus thermophilus
MTKPYSIGLDIGTNSVGWAVITDNYKVPSKKMKVLGNTSKKYIKKNLLGVLLFDSGITAEGRRLKRTARRRYTRRRNRILYLQEIFSTEMATLDDAFFQRLDDSFLVPDDKRDSKYPIFGNLVEEKAYHDEFPTIYHLRKYLADSTKKADLRLVYLALAHMIKYRGHFLIEGEFNSKNNDIQKNFQDFLDTYNAIFESDLSLENSKQLEEIVKDKISKLEKKDRILKLFPGEKNSGIFSEFLKLIVGNQADFRKCFNLDEKASLHFSKESYDEDLETLLGYIGDDYSDVFLKAKKLYDAILLSGFLTVTDNETEAPLSSAMIKRYNEHKEDLALLKEYIRNISLKTYNEVFKDDTKNGYAGYIDGKTNQEDFYVYLKNLLAEFEGADYFLEKIDREDFLRKQRTFDNGSIPYQIHLQEMRAILDKQAKFYPFLAKNKERIEKILTFRIPYYVGPLARGNSDFAWSIRKRNEKITPWNFEDVIDKESSAEAFINRMTSFDLYLPEEKVLPKHSLLYETFNVYNELTKVRFIAESMRDYQFLDSKQKKDIVRLYFKDKRKVTDKDIIEYLHAIYGYDGIELKGIEKQFNSSLSTYHDLLNIINDKEFLDDSSNEAIIEEIIHTLTIFEDREMIKQRLSKFENIFDKSVLKKLSRRHYTGWGKLSAKLINGIRDEKSGNTILDYLIDDGISNRNFMQLIHDDALSFKKKIQKAQIIGDEDKGNIKEVVKSLPGSPAIKKGILQSIKIVDELVKVMGGRKPESIVVEMARENQYTNQGKSNSQQRLKRLEKSLKELGSKILKENIPAKLSKIDNNALQNDRLYLYYLQNGKDMYTGDDLDIDRLSNYDIDHIIPQAFLKDNSIDNKVLVSSASNRGKSDDFPSLEVVKKRKTFWYQLLKSKLISQRKFDNLTKAERGGLLPEDKAGFIQRQLVETRQITKHVARLLDEKFNNKKDENNRAVRTVKIITLKSTLVSQFRKDFELYKVCEINDFHHAHDAYLNAVIASALLKKYPKLEPEFVYGDYPKYNSFRERKSATEKVYFYSNIMNIFKKSISLADGRVIERPLIEVNEETGESVWNKESDLATVRRVLSYPQVNVVKKVEEQNHGLDRGKPKGLFNANLSSKPKPNSNENLVGAKEYLDPKKYGGYAGISNSFAVLVKGTIEKGAKKKITNVLEFQGISILDRINYRKDKLNFLLEKGYKDIELIIELPKYSLFELSDGSRRMLASILSTNNKRGEIHKGNQIFLSQKFVKLLYHAKRISNTINENHRKYVENHKKEFEELFYYILEFNENYVGAKKNGKLLNSAFQSWQNHSIDELCSSFIGPTGSERKGLFELTSRGSAADFEFLGVKIPRYRDYTPSSLLKDATLIHQSVTGLYETRIDLAKLGEG

SEQ ID NO: 785 - protein, 1388 aa, Streptococcus thermophilus
MTKPYSIGLDIGTNSVGWAVITDNYKVPSKKMKVLGNTSKKYIKKNLLGVLLFDSGITAEGRRLKRTARRRYTRRRNRILYLQEIFSTEMATLDDAFFQRLDDSFLVPDDKRDSKYPIFGNLVEEKAYHDEFPTIYHLRKYLADSTKKADLRLVYLALAHMIKYRGHFLIEGEFNSKNNDIQKNFQDFLDTYNAIFESDLSLENSKQLEEIVKDKISKLEKKDRILKLFPGEKNSGIFSEFLKLIVGNQADFRKCFNLDEKASLHFSKESYDEDLETLLGYIGDDYSDVFLKAKKLYDAILLSGFLTVTDNETEAPLSSAMIKRYNEHKEDLALLKEYIRNISLKTYNEVFKDDTKNGYAGYIDGKTNQEDFYVYLKNLLAEFEGADYFLEKIDREDFLRKQRTFDNGSIPYQIHLQEMRAILDKQAKFYPFLAKNKERIEKILTFRIPYYVGPLARGNSDFAWSIRKRNEKITPWNFEDVIDKESSAEAFINRMTSFDLYLPEEKVLPKHSLLYETFNVYNELTKVRFIAESMRDYQFLDSKQKKDIVRLYFKDKRKVTDKDIIEYLHAIYGYDGIELKGIEKQFNSSLSTYHDLLNIINDKEFLDDSSNEAIIEEIIHTLTIFEDREMIKQRLSKFENIFDKSVLKKLSRRHYTGWGKLSAKLINGIRDEKSGNTILDYLIDDGISNRNFMQLIHDDALSFKKKIQKAQIIGDEDKGNIKEVVKSLPGSPAIKKGILQSIKIVDELVKVMGGRKPESIVVEMARENQYTNQGKSNSQQRLKRLEKSLKELGSKILKENIPAKLSKIDNNALQNDRLYLYYLQNGKDMYTGDDLDIDRLSNYDIDHIIPQAFLKDNSIDNKVLVSSASNRGKSDDFPSLEVVKKRKTFWYQLLKSKLISQRKFDNLTKAERGGLLPEDKAGFIQRQLVETRQITKHVARLLDEKFNNKKDENNRAVRTVKIITLKSTLVSQFRKDFELYKVREINDFHHAHDAYLNAVIASALLKKYPKLEPEFVYGDYPKYNSFRERKSATEKVYFYSNIMNIFKKSISLADGRVIERPLIEVNEETGESVWNKESDLATVRRVLSYPQVNVVKKVEEQNHGLDRGKPKGLFNANLSSKPKPNSNENLVGAKEYLDPKKYGGYAGISNSFAVLVKGTIEKGAKKKITNVLEFQGISILDRINYRKDKLNFLLEKGYKDIELIIELPKYSLFELSDGSRRMLASILSTNNKRGEIHKGNQIFLSQKFVKLLYHAKRISNTINENHRKYVENHKKEFEELFYYILEFNENYVGAKKNGKLLNSAFQSWQNHSIDELCSSFIGPTGSERKGLFELTSRGSAADFEFLGVKIPRYRDYTPSSLLKDATLIHQSVTGLYETRIDLAKLGEG

SEQ ID NO: 786 - protein, 595 aa, Streptococcus thermophilus
MVQFRKANSSIFGKGWHNFSVKLMMELIPELYETSEEQMTILKRLGKQKTTSSSNKTKYIDEKLLTEEIYNPVVAKSVRQAIKIVNAAIKEYGDFDNIVIEMARETNEDDEKKAIQKIQKANKDEKDAAMLKAANQYNGKAELPHSVFHGHKQLATKIRLWHQQGERCLYTGKTISIHDLINNPNQFEVDHILPLSITFDDSLANKVLVYATANQEKGQRTPYQALDSMDDAWSFRELKAFVRESKTLSNKKKEYLLTEEDISKFDVRKKFIERNLVDTRYASRVVLNALQEHFRAHKIDTKVSVVRGQFTSQLRRHWGIEKTRDTYHHHAVDALIIAASSQLNLWKKQKNTLVSYSEDQFLDIETGELISDDEYKESVFKAPYQHFVDTLKSKEFEDSILFSYQVDSKFNRKISDATIYATRKAKLDKEKKEYTYTLGKIKDIYTQAGYDAFIKIYKKDKSKFLMYHHDPQTFEKVIEPILENYPNKEINEKGKEVPCNPFLKYKEEHGYIRKYSKKGNGPEIKSFKYYDNLLGRHIDITPKNSKNIVALRKLNPWRTDVYFNHETMKYEFLGLKYADISYKKSKNKAGDFLPK

SEQ ID NO: 787 - protein, 1388 aa, Streptococcus thermophilus]
MTKPYSIGLDIGTNSVGWAVITDNYKVPSKKMKVLGNTSKKYIKKNLLGVLLFDSGITAEGRRLKRTARRRYTRRRNRILYLQEIFSTEMATLDDAFFQRLDDSFLVPDDKRDSKYPIFGNLVEEKVYHDEFPTIYHLRKYLADSTKKADLRLVYLALAHMIKYRGHFLIEGEFNSKNNDIQKNFQDFLDTYNAIFESDLSLENSKQLEEIVKDKISKLEKKDRILKLFPGEKNSGIFSEFLKLIVGNQADFRKCFNLDEKASLHFSKESYDEDLETLLGYIGDDYSDVFLKAKKLYDAILLSGFLTVTDNETEAPLSSAMIKRYNEHKEDLALLKEYIRNISLKTYNEVFKDDTKNGYAGYIDGKTNQEDFYVYLKNLLAEFEGADYFLEKIDREDFLRKQRTFDNGSIPYQIHLQEMRAILDKQAKFYPFLAKNKERIEKILTFRIPYYVGPLARGNSDFAWSIRKRNEKITPWNFEDVIDKESSAEAFINRMTSFDLYLPEEKVLPKHSLLYETFNVYNELTKVRFIAESMRDYQFLDSKQKKDIVRLYFKDKRKVTDKDIIEYLHAIYGYDGIELKGIEKQFNSSLSTYHDLLNIINDKEFLDDSSNEAIIEEIIHTLTIFEDREMIKQRLSKFENIFDKSVLKKLSRRHYTGWGKLSAKLINGIRDEKSGNTILDYLIDDGISNRNFMQLIHDDALSFKKKIQKAQIIGDEDKGNIKEVVKSLPGSPAIKKGILQSIKIVDELVKVMGGRKPESIVVEMARENQYTNQGKSNSQQRLKRLEKSLKELGSKILKENIPAKLSKIDNNALQNDRLYLYYLQNGKDMYTGDDLDIDRLSNYDIDHIIPQAFLKDNSIDNKVLVSSASNRGKSDDFPSLEVVKKRKTFWYQLLKSKLISQRKFDNLTKAERGGLLPEDKAGFIQRQLVETRQITKHVARLLDEKFNNKKDENNRAVRTVKIITLKSTLVSQFRKDFELYKVREINDFHHAHDAYLNAVIASALLKKYPKLEPEFVYGDYPKYNSFRERKSATEKVYFYSNIMNIFKKSISLADGRVIERPLIEVNEETGESVWNKESDLATVRRVLSYPQVNVVKKVEEQNHGLDRGKPKGLFNANLSSKPKPNSNENLVGAKEYLDPKKYGGYAGISNSFAVLVKGTIEKGAKKKITNVLEFQGISILDRINYRKDKLNFLLEKGYKDIELIIELPKYSLFELSDGSRRMLASILSTNNKRGEIHKGNQIFLSQKFVKLLYHAKRISNTINENHRKYVENHKKEFEELFYYILEFNENYVGAKKNGKLLNSAFQSWQNHSIDELCSSFIGPTGSERKGLFELTSRGSAADFEFLGVKIPRYRDYTPSSLLKDATLIHQSVTGLYETRIDLAKLGEG

SEQ ID NO: 788 - protein, 1038 aa, Streptococcus vestibularis
MIDELSNEELFIALKNMVKHRGISYLDDASDDGNSSVGDYAQIVKENSKQLETKTPGQIQLERYQKYGQLRGDFTVEEDGKKHRLINVFPTSAYRAEALRILQTQQEFNSQITDEFINRYLEILTGKRKYYHGPGNEKSRTDYGRYRTSGETLDNIFGILIGKCTFYPEEFRAAKASYTAQEFNLLNDLNNLTVPTETKKLSEEQKNQIINYVKNEKAMGPAKLFKYIAKLLSCDIADIKGYRIDKSDKAEIHTFEAYRKMKTLETIDIEKMSREELDKLAYVLTLNTEREGIQEALEHEFVDGNFSQEQIDELVQFRKANSSIFGKGWHNFSVKLMMELIPELYATSEEQMTILTRLGKQKTTSSSNKTKYIDEKLLTEEIYNPVVAKSVRQAIKIVNAAIKEYGDFDNIVIEMARATNEDDEKKAIQKIQKANKDEKDAAMLKAANQYNGKAELPHSVFHGHKQLATKIRLWHQQGERCLYTGKTISIHDLINNPNQFEIDHILPLSITFDDSLANKVLVYATANQEKGQRTPYQALDSMDDAWSFRELKAFVRESKTLSNKKKEYLLTEEDISKFDVRKKFIERNLVDTRYASRVVLNALQEHFRAHKIDTKVSVVRGQFTSQLRRHWGIEKTRDTYHHHAVDALIIAASSQLNLWKKQKNTLVNYSENQLLDIETGELISDDEYKESVFKAPYQHFVDTLKSKEFEDSILFSYQVDSKFNRKISDATIYATRKAKLDKEKKEYTYTLGKIKDIYALGTKTPSKTGFYKFLDLYKKNKSQFLMYQKDRKTWDEVIEKILEQYRPFKEKDKNGKEVDFNPFEKYRIENGPIRKYSRKGNGPEIKSLKYYDNLLGRFVDITPSESKNPVALLSLNPWRTDVYYNTETRKYEFLGLKYADLCFEKGGSYGISKVKYNKIREKEGIGKNSEFKFTLYKNDLILIKDTETNRQQVFRFWSRTGKDNPKRFEKHKIELKPYEKARFEKGEELEVLGKVPPSSNQLQKNMQIENLSIFKVRTDVLGNQHIIKNEGDKPKLDF

SEQ ID NO: 789 - protein, 97 aa, Streptococcus vestibularis
MSDLVLGLDIGIGSVGVGILNKVTGEIIHKNSRIFPAAQAENNVERRTNRQGRRLTRRKKHRRVRLNHLFEESGLITDFTKVSINLNPYQLRVKIDR

SEQ ID NO: 790 - protein, 1084 aa, Subdoligranulum sp.
MKNTLYGIGLDIGVASVGWAVVGLNGTGEPVGLHRLGVRIFDKAEQPKTGESLAAPRRMARGMRRRLRRKALRRADVYALLERSGLSTREELAQMFEAGGLEDIYALRTRALDEPVGKAEFSRILLHLAQRRGFKSNRRTASDGEDGRLLAAVNENRRRMAQGGWRTVGEMLYRHEAFALHKRNKADDYLSTVGRDMVAEEASILFERQRAMGCSWAAPELQAEYLSILLRQRSFDEGPGGNSPYGGNQVEKMVGRCTFEPDEPRAAKAAYSFEYFSLLQKLNHIRLAENGETRPLTQPQRQQLLSLAHKTPDISLARIRKELALPETVQFNGVRCRANETLEESEKKEKFACLPAYHKMRKALDGVVKGRISSLSISQRDAAATALSLYKNEDTLRAKLTEAGFQAPEIDALAGLTGFSKFGHLSLKACRKLIPHLEQGLTYDQACTAAGYDFKGHGAGERAFTLPAAAPEMEQITSPVVRRAVAQTIKVVNGIIREMDASPAWVRIELARELSKTFGERQEMDRSMRENAAQNERLMQELRDTFHLLSPTGQDLVKYRLWKEQDGVCAYSLRRLDVERLFEPGYVDVDHIVPYSLSFDDRRSNKVLVLSSENRQKGNRLPLQYLQGKRREDFIVWTNSSVHDYRKRQNLLREKLSGDEAEGFRQRNLQDTQHMARFLYNYISDHLAFAQSEALGKKRVFAVSGAVTSHLRKRWGLSKVRADGDLHHALDAAVVACTTDGMIRRISGYYGHIEGEYLQDADGAGSQHARTKERFPAPWPRFRDELIVRLSEQPAEPLLDINPEFYCEYGTEHIRPVFVSRMPRRKVTGPGHKETIKGAAAADEGLLTVRKALTELKLDKDGEIKDYYMPSSDTLLYEALKAQLRRFGGDGKKAFAEPFYKPKADGTPGPLVRKVKTTEKATLTVPVHGGAASNDTMVRVDVFLVPGDGYYWVPVYTADTLKPELPNRAVVQGKPYSEWKEMREEDFIFSLYPNDLVYVEHKSGLKFTLQNADSTLEKTRTQTSAFAYFVSGSISTASITIRTHDNAYGIPSLGVKTLKTFHKYQVDVLGNVFPVHKETRQKFR

SEQ ID NO: 791 - protein, 951 aa, Sutterella parvirubra
MPTVRPVFHSSASFDLGAKNTGLFLVNHPAGAAPSAEYAAAYTIVQPADGDGLNYSTTNRRAVRHRLRGGKRFKLARRLVLQVIDALRKLKPGLIRDEEMRRTVEALSSLLKRRGFTRIESEAQVDPTTLDSVDPAVFADHETLGGFFSLGIPISTQWDALSQNPGAVEQLFKALPSAKDFGKYVTEQFPEFAEQKKLYADAIKVLSSEAKSIVMQLGLGHHHRSKYFEMIAHDMLRDPRLQGVFELFGSEERFKTFICNVSNLQLRALRWYFDEPNPEVANQWNPEKFQVVWLRGLKYFHPDAERKADMKKLIDELTASKDILDALCTTDPRRTIPPYEDQNNRRPPFDQTLWLSAAELTRRYGDKWRIWSQKFERADRALSTGLDEILLYTDRRSRMFNRNQDPSVYADSYVLQRVLDRSSKLDRYALRALAAGYRTQELHEPLATLSDTLGTQHVETFLTFAAEYYEEVAAAKNGLWLDGPSRLLERADIHPPMKKKVLDLLLGNILDATPEIGRILRTVLWNRHVHEKSRSTPASLCRSIEAIRKDFGGEFRMRYDALDAKIRAAEDQKKKFKPTNAEEKDLFKAWNATKTMHAFLRDVLQLTPKQLERTASPYVFAQLHTLIDTERDGFTSTSLAAHLENHWRMRANAAGMAQCSRLPADAVRPFDGVLSKALDRQAFEAAKLAAQHLMSRKELTDTDIRYSIIIESNRFAFSASTAELKKNTLAKKNAEKGLNFELKRWQDKDSRIREASRGICAYTGAKLGDVVEYDHIIPRAFTTSAMGSVFNSEANLICVSRPGNQTKADKRYGLNKLHKTYLTAVFGTADVTTIAASIEDIVGKLASANRLRHFELLNEKEQDAVRHALFLDDESDARRIVLRELAAQNKSRVNGTQAWFVRAFMTKLLEITKDWRERTGNTLDIRSWKTDAEVASRLRSALNFHAEITLT

SEQ ID NO: 792 - protein, 406 aa, Sutterella parvirubra
SNLFREEVPYGDHFLPIIQMKNRIYIGYQLPKADGTGGNAVAVLGKDPLELLETLKPFLDREPQAFSDHPVTYKMINERAYELLTKCALTPDQTTELERTQAEVLRSLNYQTSRAAVLGRLVDDKNKFVAKDAVWKEKDFVISFKLSPKKSAFKASGQLELPAKSDWKALVDSPELAINWGQPADDTFSQRIERKVRMNSSHLEHTPKKRVVSLPVVDKPSGGFRIRRHNLDGSAVFQVHTVANNKYGGFSADSAGKVDWSTPVLCGHLQHANLVPLDPETASAEQLVRMSEWRVVETTSDIRLEVCPGTSGRRYVRVELPFTLLQEWLTAGKVADVPVSPLHLPGSIKLTDPKTFCAEAQKTLSIFAQPRATIFFEQLGDRVRFRFEASGGPATMNAAYNAAGRS

SEQ ID NO: 793 - protein, 389 aa, Sutterella wadsworthensis
MKACDLEEKTNHLQACVAIDLGARYTGTFSILHKSSHLPSKDDCRAATYVLPEDGGKMTYSQRNRTAVRHRIRGKKRFALARRMAMLIIREKLAAKSVTLTSSETRRLAEAVGSLLRRRGYNRLETETDNDLTVLENIEPEVFSEHEILGKYFYAGTDLAIQWETLSQDLSKISSLLAERLSEKDFKKYLTGLIPDDKNKIKHIISVFKMLIDEAESINMQCVLGHKHRTQYLSDIHADMHRDTRLSKAAEAFGGVDRLWRLLGNLSNLQLRAHRWYFNAPHLFDDQALEPARLQKTLVRAFKYLHCPQGVESRAQAELVKELEEADDIIDALCTIDPVRTIPPYENQQNRRPPFDQTLYLSPDLGVSGFLCLGRLFQGQPNEAALCFL

SEQ ID NO: 794 - protein, 976 aa, Tannerella sp.
MKKILGLDLGSNSIGWALVNEAENRDEASSIIKLGVRVNPLTVDEMQNFEKGKSITTNADRTLKRSMRRNLQRYKLRRDALIKLLKKVGFITDGTILSEQGNRTTFETYRLRAKAPDEEISLQELARVLLMINKKRGYKSSRKIKEKEAGTLIDGMEVAKKLYDEDLTPGQLCLQLLESGKKSLPDFYSSDLQEEFDRIWNFQKQFNPKAFCDTAKEEIKGKNKSQTWAILAKYFIWMEEMDVWNEKESKTERVEKECKLVGLKRTVKKEEQRKENYCWRVQALTEQLDLEKVAVVLQEINGQISTSSGYLGAISDRSKVLYFNRQTVGQYQMAELEKNPNTSLRNMVFYRQDYLDEFDKIWEKQAEFHKELTVELKKEIRDIIIFYQRRLKSQKGLIGFCEFENREIMVEKNGKMQAKVVGCKVIPRSHPLFQEFKIWQTLNNVEVFAGEKKCKRKRTDAFPGLFDGTEDTLMVEGWRYLYQEEKEILAKELSVKKSLKKEYILKLLFDNPQDLDMNFEQIEGNDTGNVLFSAYSKMIEKYGYEPLDFGKPTDKIIEQLQVIFADLGWNTDLLFVDLNKEGKDLEKQPYFKLWHLLYSFEGDNTPTGNGKLVEKLMELCHVGKECALELVNISFQNDYGSLSAKAIKKILPYLKEGNRYDVACGYAGYRHSKSSLTKEEIENKVLKDKLDILPKNSLRNPVVEKILNQMVNVINAIIDTYGKPDEIRVELARELKKSAKEREELTKAIAKSTREHEEIRKVLQEEFGMINVSRNDIIRYKLYKELKDNGYKTLYSNQDIPKEKVFSKEIDIEHIIPQARLFDDSLSNKTLEYKAINIEKGNKTAYDFVKEKYGEKGLQQYLNRCESLFKGHRTKLRKLKMGQENIPEGFIDRDLRNTQYIAKKALAMLNEICRRVVATTGSITDRLREDWQLVDVLKELRCFRYFKDTKMKANHNKNIFYTSIKVDVSDTSKILK

SEQ ID NO: 795 - protein, 1049 aa, Tistrella mobilis
MINERLTFGIDLGIGSCGWAVLRHADAAGEPGVIEGLGSWCFDVPETSKERIPTNQVRRSNRLLRRVIRRRRNRMAEIRRLFHAQGLLPSADEDALKRPRLDPWELRARGLDQCLSAEEFAVALGHIARHRGFRSSAKRKAANTSGEDSKMLSALLVTRERTARYRTVGEMFARDPEYSARRRNRDGIFDRTVARDDLIHEVGKLFEAQRARGSAFASPDLEADFNAIAFRQAEMQDSERLVGNCPFERDEKRAARWAPSFERFRLLTRLINLRIATAEGERRFTPEDLARVSAELGATAKLPVSRVRALIGLLPDERFTTIRVEDEDRDIVARTGEAAPGTWRLRKTLGEALWAEMQARPDQLDAIAHVLSFFEATAKIRSELDRLGLPAAVIEALDRGLEDGAFAKFKGAGHISAKACRNLLPHLQQGHRYDQACRLAGYDHAASTLSHTAQVVSKAGFNALVTELGESIANPIARKALTEGLKQIRAMCARWGLPGAIHIELAREVGNSIEKRRELESQRETTTKRRQTERDEIRGLLALEDVDDDTLLRYRLWKEQGGKCLYTGKDIHVRQLIATDNSVQVDHILPWSRFGDDSFNNKTLCLASANQRKRGQTPWEWFSLTGTPEAWEVFASRVETSKDLRGFKKRNLLLKNADEVAQRFRSRNLNDTRYAARLLAEAAKLFYPAGDRQEKDGRRRVLTRPGPLTAALRHAWGLESLKKADGKRVSDDRHHALDALAVAAISEREVQRLTRSFQEWEQQGLARPLRHVAPPWPGFRGDVLAAYAQAFVARPERRRARGKGHDASIRQVVGEGPEAQVFERRGLADLKEADLDRVKDPERNQAIIEAVRAWILAGRPADAPPRSPRGDVIVKLRTAPAKKIKPAVPVRGGTADRGDMVRIDVFTRPNRKGRDEWYLVPIYPHQVMNRKAWPHPPMRSVVAYKDEAGWTEIGAEHSFRFSLYPRSYVQLVKSNGDVIEGYLVSMDRSTGAFRVFVHNNPAEMAKGIGAKTLLNLRKFNVDRFGVRTEVKSEVRTWHGEVCTSPVPPD

SEQ ID NO: 796 - protein, 1395 aa, Treponema denticola
MKKEIKDYFLGLDVGTGSVGWAVTDTDYKLLKANRKDLWGMRCFETAETAEVRRLHRGARRRIERRKKRIKLLQELFSQEIAKIDEGFFQRMKESPFYAEDKTILQENALFNDKDFTDKTYHKAYPTINHLIKAWIENKVKPDPRLLYLACHNIIKKRGHFLFEGDFDSENQFDTSIQALFEYLREDMEVDIDADSQKVKEILKDSSLKNSEKQSRLNKILGLKPSDKQKKAITNLISGNKINFADLYDNPDLKDAEKNSISFSKDDFDALSDDLASILGDSFELLLKAKAVYNCSVLSKVIGDEQYLSFAKVKIYEKHKTDLTKLKAVIKKHFPNNYKKVFGYNQDNESKNNYSGYVGVCKTKNKKLVINNSVNQEDFYKFLKPILSAKSEIKEVNDILAEIETGNFLPKQISKSNAEIPYQLRKMELEKILSNAEKHFSFLKQKDEKGLSHSEKIIMLLTFKIPYYIGPINDNHKKSFPDRCWVVKKEKSPSGKTTPWNFFDHIDKEKTAEEFITSRTNFCTYLIGESVLPKNSLLYSEYTVLNEINNLQIIIDGKNICDTKLKQKIYEDLFKKYKKITQKQISTFIKHEGICNKTDEVIILGIDKECTSSLKSYIELKNIFGKQVDEISTKNMLEEIIRWATIYDEGEGKTILKTKIKAEYGKYCSDEQIKKILNLKFSGWGRLSRKFLETVTSEMPGFSEPVNIITAMRETQNNLMELLSSEFKFTENIKKINSGFEDAEKQFSYDGLVKPLFLSPSVKKMLWQTLKLVKEISHITQAPPKKIFIEMAKGAELEPARTKTRLKILQDLYSSCKNDADAFSSEIQYLSGKIENEDNLRLRSDKLYLYYTQLGKCMYCGKPIEIGHVFDTSNYDIDHIYPQSKIKDDSISNRVLVCSSCNKNKEDKYPLKSEIQSKQRGFWNFLQRNNFISLEKLNRLTRTTPISDDETAKFIARQLVETRQATKVAAKVLEKMFPETKIVYSKAETVSMFRNKFDIIKCREINDFHHAHDAYLNIVVGNVYNTKFTNNPWNFIKEKRDNPKIADTYNYYKVFDYDVKRNNITAWEKGKTIITVKDMLKRNTPIYTRQAACKKGGLFDQTIMKKGLGQHPLKKEGPFSNISKYGGYNKVSAAYYTLIEYEEKGNKIRSLETIPLYLVKDIQKDQDVLKSYLTDLLGKKEFKILVPKIKINSLLKINGFPCHITGKTNDSFLLRPAVQFCCSNDEVLYFKKIIRFSEIRSQREKIGKTISPYEDLSFRSYIKENLCKKTKNDEIGEKEFYDLLQKKNLEIYDMLLTKHKDTIYKKRPNSATIDILVKGKEKFKSLIIENQFEVILEILKLFSATRNVSELQHIGGSKYSGVAKIGNKISSLDNCILIYQSITGIFEKRIDLLKV

SEQ ID NO: 797 - protein, 769 aa, Treponema denticola
MKKEIKDYFLGLDVGTGSVGWAVTDTDYKLLKANRKDLWGMRCFETAETAEVRRLHRGARRRIERRKKRIKLLQELFSQEIAKIDEGFFQRMKESPFYAEDKTILQENALFNDKDFTDKTYHKAYPTINHLIKAWIENKVKPDPRLLYLACHNIIKKRGHFLFEGDFDSENQFDTSIQALFEYLREDMEVDIDADSQKVKEILKDSSLKNSEKQSRLNKILGLKPSDKQKKAITNLISGNKINFADLYDNPDLKDAEKNSISFSKDDFDALSDDLASILGDSFELLLKAKAVYNCSVLSKVIGDEQYLSFAKVKIYEKHKTDLTKLKAVIKKHFPNNYKKVFGYNQDNESKNNYSGYVGVCKTKNKKLVINNSVNQEDFYKFLKPILSAKSEIKEVNDILAEIETGNFLPKQISKSNAEIPYQLRKMELEKILSNAEKHFSFLKQKDEKGLSHSEKIIMLLTFKIPYYIGPINDNHKKSFPDRCWVVKKEKSPSGKTTPWNFFDHIDKEKTAEEFITSRTNFCTYLIGESVLPKNSLLYSEYTVLNEINNLQIIIDGKNICDTKLKQKIYEDLFKKYKKITQKQISTFIKHEGICNKTDEVIILGIDKECTSSLKSYIELKNIFGKQVDEISTKNMLEEIIRWATIYDEGEGKTILKTKIKAEYGKYCSDEQIKKILNLKFSGWGRLSRKFLETVTSEMPGFSEPVNIITAMRETQNNLMELLSSEFKFTENIKKINSGFEDAEKQFSYDGLVKPLFLSPSVKKCCGRL

SEQ ID NO: 798 - protein, 1395 aa, Treponema denticola
MKKEIKDYFLGLDVGTGSVGWAVTDTDYKLLKANRKDLWGMRCFETAETAEVRRLHRGARRRIERRKKRIKLLQELFSQEIAKIDEGFFQRMKESPFYAEDKTILQENALFNDKDFTDKTYHKAYPTINHLIKAWIENKVKPDPRLLYLACHNIIKKRGHFLFEGDFDSENQFDTSIQALFEYLREDMEVDIDADSQKVKEILKDSSLKNSEKQSRLNKILGLKPSDKQKKAITNLISGNKINFADLYDNPDLKDAEKNSISFSKDDFDALSDDLASILGDSFELLLKAKAVYNCSVLSKVIGDEQYLSFAKVKIYEKHKTDLTKLKAVIKKHFPNNYKKVFGYNQDNESKNNYSGYVGVCKTKNKKLVINNSVNQEDFYKFLKPILSAKSEIKEVNDILAEIETGNFLPKQISKSNAEIPYQLRKMELEKILSNAEKHFSFLKQKDEKGLSHSEKIIMLLTFKIPYYIGPINDNHKKSFPDRCWVVKKEKSPSGKTTPWNFFDHIDKEKTAEEFITSRTNFCTYLIGESVLPKNSLLYSEYTVLNEINNLQIIIDGKNICDTKLKQKIYEDLFKKYKKITQKQISTFIKHEGICNKTDEVIILGIDKECTSSLKSYIELKNIFGKQVDEISTKNMLEEIIRWATIYDEGEGKTILKTKIKAEYGKYCSDEQIKKILNLKFSGWGRLSRKFLETVTSEMPGFSEPVNIITAMRETQNNLMELLSSEFKFTENIKKINSGFEDAEKQFSYDGLVKPLFLSPSVKKMLWQTLKLVKEISHITQAPPKKIFIEMAKGAELEPARTKTRLKILQDLYSSCKNDADAFSSEIQYLSGKIENEDNLRLRSDKLYLYYTQLGKCMYCGKPIEIGHVFDTSNYDIDHIYPQSKIKDDSISNRVLVCSSCNKNKEDKYPLKSEIQSKQRGFWNFLQRNNFISLEKLNRLTRTTPISDDETAKFIARQLVETRQATKVAAKVLEKMFPETKIVYSKAETVSMFRNKFDIIKCREINDFHHAHDAYLNIVVGNVYNTKFTNNPWNFIKEKRDNPKIADTYNYYKVFDYDVKRNNITAWEKGKTIITVKDMLKRNTPIYTRQAACKKGELFNQTIMKKGLGQHPLKKEGPFSNISKYGGYNKVSAAYYTLIEYEEKVNKIRSLETIPLYLVKDIQKDQDVLKSYLTDLLGKKEIKILVPKIKINSLLKINGFPCHITGKTGDSFVLRPAVQFCCSNDEVLYFKKIIRFNEIRSQREKMGKTISPYEDLSFRSYIKENLCKKTKADEIGEKEFYDLLQKKNLEIYDMLLTKHKDTIYNKRPNSTTLGMLTKGRYEFINLKPKDQIIVMLEILKLFCTTREAIDLGLIKGKPAAGVATLGKKISNLDNCILIYQSITGIFEKRIDLLKV

SEQ ID NO: 799 - protein, 1395 aa, Treponema denticola
MKKEIKDYFLGLDVGTGSVGWAVTDTDYKLLKANRKDLWGMRCFETAETAEVRRLHRGARRRIERRKKRIKLLQELFSQEIAKIDEGFFQRMKESPFYAEDKTILQENTLFNDKDFTDKTYHKAYPTINHLIKAWIENKVKPDPRLLYLACHNIIKKRGHFLFEGDFDSENQFDTSIQALFEYLREDMEVDIDADSQKVKEILKDSSLKNSEKQSRLNKILGLKPSDKQKKAITNLISGNKINFADLYDNPDLKDAEKNSISFSKDDFDALSDDLASILGDSFELLLKAKAVYNCSVLSKVIGDEQYLSFAKVKIYEKHKTDLTKLKNVIKKHFPKDYKKVFGYNKNEKNNNNYSGYVGVCKTKSKKLIINNSVNQEDFYKFLKTILSAKSEIKEVNDILTEIETGTFLPKQISKSNAEIPYQLRKMELEKILSNAEKHFSFLKQKDEKGLSHSEKIIMLLTFKIPYYIGPINDNHKKSFPDRCWVIKKEKSPSGKTTPWNFFDHIDKDKTAEAFITSRTNFCTYLVGESVLPKSSLLYSEYTVLNEINNLQIIIDGKNICDIKLKQKIYEELFKKYKKITQKQISTFIKHEGICNKTDEVIILGIDKECTSSLKSYIELKNIFGKQVDEISTKNMLEEIIRWATIYDEGEGKTILKTKIKAEYGKYCSDEQIKKILNLKFSGWGRLSRKFLETVTSEMPGFSEPVNIITAMRETQNNLMELLSSEFKFTENIKKINSGFEDAEKQFSYNGLVKPLFLSPSVKKMLWQTLKLVKEISHITQAPPKKIFIEMAKGAELEPARTKTRLKILQDLYNNCKNDADAFSSEIKDLSGKIENEDNLRLRSDKLYLYYTQLGKCMYCGKPIEIGHVFDTSNYDIDHIYPQSKIKDDSISNRVLVCSSCNKNKEDKYPLKSEIQSKQRGFWNFLQRNNFISLEKLNRLTRTTPISDDETAKFIARQLVETRQATKVAAKVLEKMFPETKIVYSKAETVSMFRNKFDIIKCREINDFHHAHDAYLNIVVGNVYNTKFTNNPWNFIKEKRDNPKIADTYNYYKVFDYDVKRNNITAWEKGKTIITVKDMLKRNTPIYTRQAACKKGGLFDQTIMKKGLGQHPLKKEGAFSNISKYGGYNKVSAAYYTLIEYEEKGNKIRSLETIPLYLVKDIQKDQDVLKSYLTDLLGKKEIKILVPKIKINSLLKINGFPCHITGKTGDSFVLRPAVQFCCSNDEVLYFKKIIRFNEIRSQREKMGKTISPYEDLSFRSYIKENLCKKTKADEIGEKEFYDLLQKKNLEIYDMLLTKHKDTIYNKRPNSTTLGMLTKGRYEFINLKPKDQIIVMLEILKLFCTTREAIDLGLIKGKPAAGVATLGKKISNPDNCILIYQSITGIFEKRIDLLKV

SEQ ID NO: 800 - protein, 1395 aa, Treponema denticola
MKKEIKDYFLGLDVGTGSVGWAVTDTDYKLLKANRKDLWGMRCFETAETAEVRRLHRGARRRIERRKKRIKLLQELFSQEIAKIDEGFFQRMKESPLYAEDKTILQENTLFNDKDFTDKTYHKAYPTINHLIKAWIENKVKPDPRLLYLACHNIIKKRGHFLFEGDFDSENQFDTSIQALFEYLREDMELDIDADSQKVKEILKDSSLKNSEKQSRLNKMLGLKPSDKQKKAITNLISGNKINFADLYDNPDLKDAEKNSISFSKDDFDALSDDLASILGDSFELLLKAKAVYNCSVLSKVIGDEQYLSFAKVKIYEKHKTDLTKLKNVIKKHFPKDYKKVFGYNKNEKNNNNYSAYVGVCKITHKKLVIKNSASQEDFYKFLKTILSAKSEIKEVNDILTEIETGTFLPKQISKSNAEIPYQLRKMELEKILSNAEKHFSFLKQKDEKGLSHSEKIIMLLTFKIPYYIGPINDNHKKSFPDRCWVVKKEKSPSGKTTPWNFFDHIDKEKTAEEFITSRTNFCTYLIGESVLPKSSLLYSEYTVLNEINNLQIIIDGKNICDIKLKQKIYEELFKKYKKITQKQISTFIKHEGICNKTDEVIILGIDKECTSSLKSYIELKNIFGKQVDEISTKNMLEEIIRWATIYDEGEGKTILKTKIKAEYGKYCSDEQIKKILNLKFSGWGRLSRKFLETVTSEMPGFSEPVNIITAMRETQNNLMELLSSEFKFTENIKKINSGFEDAEKQFSYNGLVKPLFLSPSVKKMLWQTLKLVKEISHITQAPPKKIFIEMAKGAELEPARTKTRLKILQDLYSSCKNDADAFSSEIQYLSGKIENEDNLRLRSDKLYLYYTQLGKCMYCGKPIEIGHVFDTSNYDIDHIYPQSKIKDDSISNRVLVCSSCNKNKEDKYPLKAEIQSKQRGFWNFLQRNNFISLEKLNRLTRTSPISDDETAKFIARQLVETRQATKVAAKVLEKMFPETKIVYSKAETVSMFRNKFDIIKCREINDFHHAHDAYLNIVVGNVYNTKFTNNPWNFIKEKRDNPKIADTYNYYKVFDYDVKRNNITAWEKGKTIITVKDMLKRNTPIYTRQAACKKGELFNQTIMKKGLGQHPLKKEGPLSNISKYGGYNKVSAAYYTLIEYEEKGSKIRSLETIPLYLVKDIQKNKDGLKSYLTDQIGKKEIKILIPKIKINSLLKINGFPCHITGKMGEAFVLRPAVQFCCSNDEALYFKKIIRFNEIRKQREKMGKTISPYEDLSFRSYIKDNLCKKTKADEIEEKEFYDLLQKKNLEIYDMLLTKHKDTIYKKRPNSATIDILVKGKEKFKSLIIENQFEVILEILKLFSATRNVSDLQHIGGSKNAGNARVGNKISSLDNCILIYQSITGIFEKRIDLLKI

SEQ ID NO: 801 - protein, 1395 aa, Treponema denticola
MKKEIKDYFLGLDVGTGSVGWAVTDTDYKLLKANRKDLWGMRCFETAETAEVRRLHRGARRRIERRKKRIKLLQELFSQEIAKIDEGFFQRMKESPLYAEDKTILQENTLFNDKDFTDKTYHKAYPTINHLIKAWIENKVKPDPRLLYLACHNIIKKRGHFLFEGDFDSENQFDTSIQALFEYLREDMEVDIDADSQKVKEILKDSSLKNSEKQSRLNKMLGLKPSDKQKKAITNLISGNKINFADLYDNPDLKDAEKNSISFSKDDFDALSDDLASILGDSFELLLKAKAVYNCSVLSKVIGDEQYLSFAKVKIYEKHKTDLTKLKNVIKKHFPKDYKKVFGYNKNEKNNNNYSGYVGVCKTKSKKLIINNSVNQEDFYKFLKTILSAKSEIKEVNDILTEIETGTFLPKQISKSNAEIPYQLRKMELEKILSNAEKHFSFLKQKDEKGLSHSEKIIMLLTFKIPYYIGPINDNHKKSFPDRCWVVKKEKSPSGKTTPWNFFDHIDKEKTAEEFITSRTNFCTYLIGESVLPKNSLLYSEYTVLNEINNLQIIIDGKNICDTKLKQKIYEELFKKYKKITQKQISTFIKHEGICNKTDEVIILGIDKECTSSLKSYIELKNIFGKQVDEISTKNMLEEIIRWATIYDEGEGKTILKTKIKAEYGKYCSDEQIKKILNLKFSGWGRLSRKFLETVTSEMPGFSEPVNIITAMRETQNNLMELLSSEFKFTENIKKINSGFEDVEKQFSYDGLVKPLFLSPSVKKMLWQTLKLVKEISHITQAPPKKIFIEMAKGAELDPVRTKTRLKILQDLYNNCKNDADAFSSEIKDLSGKIENEDNLRLRSDKLYLYYTQLGKCMYCGKPIEIGHVFDTSNYDIDHIYPQSKIKDDSISNRVLVCSSCNKNKEDKYPLKAEIQSKQRGFWNFLQRNNFISLEKFNRLTRATPISDDETAKFIARQLVETRQATKVAARVLEKMFPETKIVYSKAETVSMFRNKFDIVKCREINDFHHAHDAYLNIVVGNVYNTKFTNNLWNFIKEKRDNPKIADTYNYYKVFDYDVKRNNITAWEKGKTIITVKDMLKRNTPIYTRQAACKKGGLFDQTIMKKGLGQHPLKKEGPFSNISKYGGYNKVSAAYYTLIEYEEKGNKIRSLETIPLYLVKDIQKDQDVLKSYLTDLLGKKEFKILVPKIKINSLLKINGFPCHITGKTNDSFLLRPAVQFCCSNDEVLYFKKIIRFSEIRSQREKIGKTISPYEDLSFRSYIKENLCKKTKNDEIGEKEFYDLLQKKNLEIYDMLLTKHKDTIYKKRPNSATIDILVKGKEKFKSLIIENQFEVILEILKLFSATRNVSDLQHIGGSKYSGVAKIGNKISSLDNCILIYQSITGIFEKRIDLLKV

SEQ ID NO: 802 - protein, 357 aa, Treponema denticola
MKKEIKDYFLGLDVGTGSVGWAVTDTDYKLLKANRKDLWGMRCFETAETAEVRRLHRGARRRIERRKKRIKLLQELFSQEIAKTDEGFFQRMKESPFYAEDKTILQENALFNDRDFTDKTYHKAYPTINHLIKAWIENKVKPDPRLLYLACHNIIKKRGHFLFEGDFDSENQFDTSIQAFFEYLREDMEVDIDADSQKIKEILKDSSLKNSEKQSRLNKILGLKSSDKQKKAITNLISGNKINFADLYDNPDLKDAEKNSISFSKDDFDALSDDLASILGDSFELLLKAKAVYNCSVLSKVIGDEQYLSFAKVKIYEKHKTDLTKLKNVIKKHFPKDYKKVFGYNKNEKITTITPDM

SEQ ID NO: 803 - protein, 1395 aa, Treponema denticola
MKKEIKDYFLGLDVGTGSVGWAVTDTDYKLLKANRKDLWGMRCFETAETAEVRRLHRGARRRIERRKKRIKLLQELFSQEIAKTDEGFFQRMKESPFYAEDKTILQENALFNDRDFTDKTYHKAYPTINHLIKAWIENKVKPDPRLLYLACHNIIKKRGHFLFEGDFDSENQFDTSIQALFEYLREDMEVDIDADSQKVKEILKDSSLKNSEKQSRLNKMLGLKPSDKQKKAITNLISGNKINFADLYDNPDLKDAEKNSISFSKDDFDALSDDLASILGDSFELLLKAKAVYNCSVLSKVIGDEQYLSFAKVKIYEKHKTDLTKLKNVIKKHFPNDYKKVFGYNKNEKNNNNYSAYVGVCKTKSKKLVINNTVNQEDFYKFLKPILLAKSEIKEVNDILTEIETGTFLPKQISKSNAEIPYQLRKMELEKILSNAEKHFSFLKQKDEKGLSHSEKIIMLLTFKIPYYIGPINDNHKKSFPDRCWVIKKEKSPSGKTTPWNFFDHIDKDKTAEAFITSRTNFCTYLVGESVLPKNSLLYSEYTVLNEINNLQIIIDGKNICDIKLKQKIYEELFKKYKKITQKQISTFIKHEGICNKTDEVIILGIDKECTSSLKSYIELKNIFGKQVDEISTKNMLEEIIRWATIYDEGEGKTILKTKIKAEYGKYCSDEQIKKILNLKFSGWGRLSRKFLETVTSEMPGFSEPVNIITAMRETQNNLMELLSSEFKFTENIKKINSGFEDVEKQFSYDSLVKPLFLSPSVKKMLWQTLKLVKEISHITQAPPKKIFIEMAKGAELDPVRTKTRLKILQDLYNNCKNDADAFSSEIKDLSGKIENEDNLRLRSDKLYLYYTQLGKCMYCGKPIEIGHVFDTSNYDIDHIYPQSKIKDDSISNRVLVCSSCNKNKEDKYPLKAEIQSKQRGFWNFLQRNNFISLEKLNRLTRTSPISDDETAKFIARQLVETRQATKVAAKVLEKMFPETKIVYSKAETVSMFRNKFDIIKCREINDFHHAHDAYLNIVVGNVYNTKFTNNPWNFIKEKRDNPKIADTYNYYKVFDYDVKRNNITAWEKGKTIITVKDMLKRNTPIYTRQAACKKGELFNQTIMKKGLGQHPLKKEGPLSNISKYGGYNKVSAAYYTLIEYEEKGSKIRSLETIPLYLVKDIQKNKDGLKSYLTDQIGKKEIKILIPKIKINSLLKINGFPCHITGKMGEAFVLRPAVQFCCSNDEALYFKKIIRFNEIRKQREKMGKTISPYEDLSFRSYIKDNLCKKTKADEIEEKEFYDLLQKKNLEIYDMLLTKHKDTIYKKRPNSATIDILVKGKEKFKSLIIENQFEVILEILKLFSATRNVSDLQHIGGSKNAGNARVGNKISSLDNCILIYQSITGIFEKRIDLLKI

SEQ ID NO: 804 - protein, 631 aa, Treponema denticola
MLWQTLKLVKEISHITQAPPKKIFIEMAKGAELEPARTKTRLKILQDLYNNCKNDADAFSSEIKDLSGKIENEDNLRLRSDKLYLYYTQLGKCMYCGKPIEIGHVFDTSNYDIDHIYPQSKIKDDSISNRVLVCSSCNKNKEDKYPLRSEIQSKQRGFWNFLQRNNFISLEKLNRLTRTTPISDDETAKFIARQLVETRQATKVAAKVLEKMFPETKIVYSKAETVSMFRNKFDIVKCREINDFHHAHDAYLNIVVGNIYNTKFTNNPWNFIKEKRDNPKIADTYNYYKVFDYDVKRNNITAWEKGKTIITVKDMLKRNTPIYTRQAACKKGGLFDQTIMKKGLGQHPLKKEGPFSNISKYGGYNKVSAAYYTLIEYEEKENKIRSLETIPLYLVKDIQKSQEKLKSYLTDLLGKKEIKILVPKIKINSLLKINGFPCHITGKTNDSFLLRPAVQFCCSNDEVLYFKKIIRFNEIRSQREKMGKTISPYEDLSFRSYIKENLCKKTKNDEIGEKEFYDLLQKKNLEIYDMLLTKHKDTIYNKRPNSTTLGMLTKGRYEFINLKPKDQIIVMLEILKLFCTTREAIDLGLIKGKPAAGVATLGKKISNLDNCILIYQSITGIFEKRIDLLKV

SEQ ID NO: 805 - protein, 631 aa, Treponema denticola
MLWQTLKLVKEISHITQAPPKKIFIEMAKGAELEPARTKTRLKILQDLYSSCKNDADAFSSEIQYLSGKIENEDNLRLRSDKLYLYYTQLGKCMYCGKPIEIGHVFDTSNYDIDHIYPQSKIKDDSISNRVLVCSSCNKNKEDKYPLKSEIQSKQRGFWNFLQRNNFISLEKLNRLTRTTPISDDETAKFIARQLVETRQATKVAAKVLEKMFPETKIVYSKAETVSMFRNKFDIIKCREINDFHHAHDAYLNIVVGNVYNTKFTNNPWNFIKEKRDNPKIADTYNYYKVFDYDVKRNNITAWEKGKTIITVKDMLKRNTPIYTRQAACKKGELFNQTIMKKGLGQHPLKKEGPFSNISKYGGYNKVSAAYYTLIEYEEKVNKIRSLETIPLYLVKDIQKDQDVLKSYLTDLLGKKEIKILVPKIKINSLLKINGFPCHITGKTGDSFVLRPAVQFCCSNDEVLYFKKIIRFNEIRSQREKMGKTISPYEDLSFRSYIKENLCKKTKADEIGEKEFYDLLQKKNLEIYDMLLTKHKDTIYNKRPNSTTLGMLTKGRYEFINLKPKDQIIVMLEILKLFCTTREAIDLGLIKGKPAAGVATLGKKISNLDNCILIYQSITGIFEKRIDLLKV

SEQ ID NO: 806 - protein, 370 aa, Treponema denticola
MTEIETGTFLPKQISKSNAEIPYQLRKMELEKILSNAEKHFSFLKQKDEKGLSHSEKIIMLLTFKIPYYIGPINDNHKKSFPDRCWVVKKEKSPSGKTTPWNFFDHIDKEKTAEEFITSRTNFCTYLVGESVLPKSSLLYSEYTVLNEINNLQIIIDGKNICDIKLKQKIYEELFKKYKKITQKQISTFIKHEGICNKTDEVIILGIDKECTSSLKSYIELKNIFGKQVDEISTKNMLEDIIRWAAIYDEGEGKTILKTKIKAEYGKYCSDEQIKKILNLKFSGWGRLSRKFLETVTSEMPGFSEPVNIITAMRETQNNLMELLSSEFKFTENIKKINSGFEDVEKQFSYDGLVKPLFLSPSVKKCCGRL

SEQ ID NO: 807 - protein, 591 aa, Treponema phagedenis
MARGKEAEKGRTSSRYASIKALYENCKQDLADYDAVLEQFKSEEPLRLRSDKLYLYYTQLGRCMYTGRVIDIDRLMSDNSAYDIDHIYPRSKIKDDSLTNRVLVVKDANQDKRDEPLSPQIQDKQKGFWDFLKHNNFISIEKYERLTYRGYFTEEMLSGFIARQLVETRQGTKTAGQILEQLYPDSTVVYCKAANTSEFRQKFNLIKCREINDLHHAHDAYLNIAVGNVYYTKFTSNPRNFMKLKEPYNLRELFDRDVERNNTIAWVKNKTITTIKDMLKRNTPLYTRYAYCKTGGFFDQNIMKKGKGQFPLKENSPLSDISKYGGYNKVSGAYFILVQKKEKDAVVRILETVPLYLLNKPGKESENVREYLSTALGTKDFKILIPKIKINSLFKINGFLVHITGKTNDRFLVRSAVQFFCDDNLTLFFKRIIAFNGLRNLNKDKSMTAYDDNTMRVYVRGNLFKDKNQLFDKNKFNEIVKGKNISVYKDMVKRYETSIYKFRPNTAVIPILKSGEDKFINLPIEEQFKILQEILKLFGAINGTANLTLIGGRPSTGEMKISNNISNLKQCILIHQSPTGVFEQQIDLLKI

SEQ ID NO: 808 - protein, 1062 aa, Treponema sp.
MIMKLEKWRLGLDLGTNSIGWSVFSLDKDNSVQDLIDMGVRIFSDGRDPKTKEPLAVARRTARSQRKLIYRRKLRRKQVFKFLQEQGLFPKTKEECMTLKSLNPYELRIKALDEKLEPYELGRALFNLAVRRGFKSNRKDGSREEVSEKKSPDEIKTQADMQTHLEKAIKENGCRTITEFLYKNQGENGGIRFAPGRMTYYPTRKMYEEEFNLIRSKQEKYYPQVDWDDIYKAIFYQRPLKPQQRGYCIYENDKERTFKAMPCSQKLRILQDIGNLAYYEGGSKKRVELNDNQDKVLYELLNSKDKVTFDQMRKALCLADSNSFNLEENRDFLIGNPTAVKMRSKNRFGKLWDEIPLEEQDLIIETIITADEDDAVYEVIKKYDLTQEQRDFIVKNTILQSGTSMLCKEVSEKLVKRLEEIADLKYHEAVESLGYKFADQTVEKYDLLPYYGKVLPGSTMEIDLSAPETNPEKHYGKISNPTVHVALNQTRVVVNALIKEYGKPSQIAIELSRDLKNNVEKKAEIARKQNQRAKENIAINDTISALYHTAFPGKSFYPNRNDRMKYRLWSELGLGNKCIYCGKGISGAELFTKEIEIEHILPFSRTLLDAESNLTVAHSSCNAFKAERSPFEAFGTNPSGYSWQEIIQRANQLKNTSKKNKFSPNAMDSFEKDSSFIARQLSDNQYIAKAALRYLKCLVENPSDVWTTNGSMTKLLRDKWEMDSILCRKFTEKEVALLGLKPEQIGNYKKNRFDHRHHAIDAVVIGLTDRSMVQKLATKNSHKGNRIEIPEFPILRSDLIEKVKNIVVSFKPDHGAEGKLSKETLLGKIKLHGKETFVCRENIVSLSEKNLDDIVDEKIKSKVKDYVAKHKGQKIEAVLSDFSKENGIKKVRCVNRVQTPIEITSGKISRYLSPEDYFAAVIWEIPGEKKTFKAQYIRRNEVEKNSKGLNVVKPAVLENGKPHPAAKQVCLLHKDDYLEFSDKGKMYFCRIAGYAATNNKLDIRPVYAVSYCADWINSTNETMLTGYWKPTPTQNWVSVNVLFDKQKARLVTVSPIGRVFRK

SEQ ID NO: 809 - protein, 281 aa, Treponema vincentii
MKTLGLDIGTNSIGWGIVDETANKIEDCGVYIFPEGVKKEKGNESSKAAERTSFRLARRLKFRRKLRKCETLKVLIKNKMCPLTMEELEKWRKQKIYPVSQDFLNWYRTDELKNWEPYFLRKKCAEQKAGPYEIGRALYHLAQRRGFLSNRKESTKASDGKVSKSIDELSSLMDGRTLGQYFYELKQSGEKVRGKYTSRKEHYEKEFNKICEVQEISPELKDDLYRAIFFQRKLKSQKFLVGKCTFERNKPRAPISHFEFEEFRMLSFINSIKIAKKLRRR

SEQ ID NO: 810 - protein, 675 aa, uncultured bacterium
MTAENYSNVRFAFDIGTNSIGWAVFQLNDKQEATSILNAGARIFSDGRDPKTFEPLAVRRRNVRSASRMRDRYLRRRKRTLDKLIGYGLLPEDKAERDKILLETNDKPSGSTDKKTDPYSLRARALEEKLPLAYVARALFHIGQRRGFKSNRKADRKSNEKGKIAAGIEELSGLMHQSHAPTLGAYLAKRREEGHVVRLRASSEALTNKAYAFYPERAMLEDEFHKIWQAQAEYYPDVLTKEREEELFHVMFFQRPLKEQKVGLCTLVEGELRLPKSDPLFQQFRLYKEINELAIILPDLSQRKLTMEERDTLITLMRPAKTKTFAALRKALKIPAGGRFNKETENRKQLTGDEVYSVFSKPELFGGDWAKFSIEQQREIIDQLNNEENPDKLEEWLKNKFPKLSDEQRSEIINANLPDGYGRFGITATSKILEQLKKDVISEAEAAHRCGFDHSLANRNWKGLDELPRYQEVLERHIVPGTGDKNDIYDIYKGRLTNPTVHIGLNQVRRLTNRLIKAYGKPWQIVVELARDLPMSSEERKEHNKTLNDNIKAGFERTQKLERLGQKDNANNRLLLKLWEELGKDPDDRKSIYSGTRITEPMLFSGEVEIDHILPFSLTYDDSYANKILCLREENRIKRNRAPADVTEWKDRYDEIIGRSKNCQRTNKNVLGPMQ

SEQ ID NO: 811 - protein, 1017 aa, uncultured bacterium]
MRVDSLGRCLSDEEWARVIYHLCKHRGFHWISRAEAKQTEGDSKSEGGKVKQGLAGTAKLMDEKGYRSAAEMVLAEFPEAQRNKQGEYRKALSRELLAKELALLFARQRVFGNRHATDTLETAILGNSDKKSGLFWQQKPALAGADLLKMLGTCTFEKNEYRAPKASFTAERHVWLTRLNNLRIVTDGITRQLTEQERQLVLPLPYRQAGDLTYKQLGMALTKAGLLEAGCFKFIGLAYPTEAQKAEGKTKDPESATLVKIPAWQELRQTLNKASLNDEWEKLSGDALCGQPEIFDKIAWILSVYKDDDEVRTELAKLVLPNPEGLTEALLNIRFDKFHALSLKALRAIVPHMEKGLRYDEACVQAGYHHSQLHKIGEGEHKYLPPLYDGRDGDGRMIFAEDADIPRNPVVLRSLNQARKVVNAIIRRYGSPSAVHIEMARDLSRPFDERNKIKKDQDEYQARNQRDREQFIELFGHPPKGLEFEKWRLYREQNGQCAYSQKPLASSGDVAEIFLDGSTEIDHALPYSRSFDDSKNNKVLVLTRENRDKGNRTPYEYLGGAENSERWQRFFSFVESNKAYRLAKRTRLLRKDFGAKESEEFRERNLNDTRYVCRFFKNYVEQHLKLAEGSEAKRCVVVSGQLTNFLRTRWGLLKIRSDSDRHHALDAAVVAACSHSMVQRLSNYSRTRELEQVRDGFVNIETGEIVNPAMHQQLREHFPDPWPYFRHELEARLKIDSPALLREEMARLSSYTEEELAALKPLFVSRAPQRRNGGAAHKDTIYGQPEKLKKNGSVSQKVALASLALKDIDLLADPHRNAKLYGAIRERLEAHGGKGDKAFPATNPLRKPDKEGNPTGPIVRTVTKVIDKLSGIPVRGGIAKNDTMLRVDVFTKAGRFHLVPVYVHHRVTGLPNQAITRGKDENQWAIIDDTFEWRFSLYPNDLVQIRLKDETHLGYYASTDRSTSSISIWAHDRNQSVGKDGLIRSIGVTTAKDIEKFHVDTLGNVYPAPPEKRRGLA

SEQ ID NO: 812 - protein, 600 aa, uncultured bacterium]
VNAIIKKHGSLSAVHIEMARDLSRPLDERREVKKLQEEFKDRNDKARESFEADHGYRPKGIVFEKWMLYREQHGKCAYSMEGLDIDRVLNDANYAQIDHALPYSRSYDDSKNNKVLVLTRENQNKGNRTAYEYLTSFAGGEDGDRWRNYAAWVNSNKSYRMAKRNRLLRKNYGPDEASGFKDRNLNDTRYICKFFKNYVEEHLQLAPRADGNANKRCVVVNGQLTAFLRARWGLSKVRSESDRHHALDAAVVAACSHGMVKALADYARNKEVAYLREGFPDPETGEIINPEAHARGVHHFPEPWAHFRHELQVRLYSDDLQALREDLQRLGTYSEQDLLGVRTLFVSRAPQRRNDGAVHKETIYAQPEALRKQGGVVQKVPLTSLSLKDLDNLADPHRNAKLYTALRARLEAHGGKADKAFGPDQPFYKPDKNGNPTGPIVRTIKLVIDKLSGIPIRGGVAKNDTMLRVDVFTKAGKFHLVPVYVHHRVTGLPDRAIVAFKDEVEWTQVDDSFKFLFSIHPNDLIRIGLKAKEPMIGYFASCHRGTGAFNVWSHDRNTSVGKSGSVEGIGIKTALSLEKLNIDVLGNVYPARPEQRHGLA

SEQ ID NO: 813 - protein, 1011 aa, uncultured delta
MSSKAIDSLEQLDLFKPQEYTLGLDLGIKSIGWAILSGERIANAGVYLFETAEELNSTGNKLISKAAERGRKRRIRRMLDRKARRGRHIRYLLEREGLPTDELEEVVVHQSNRTLWDVRAEAVERKLTKQELAAVLFHLVRHRGYFPNTKKLPPDDESDSADEEQGKINRATSRLREELKASDCKTIGQFLAQNRDRQRNREGDYSNLMARKLVFEEALQILAFQRKQGHELSKDFEKTYLDVLMGQRSGRSPKLGNCSLIPSELRAPSSAPSTEWFKFLQNLGNLQISNAYREEWSIDAPRRAQIIDACSQRSTSSYWQIRRDFQIPDEYRFNLVNYERRDPDVDLQEYLQQQERKTLANFRNWKQLEKIIGTGHPIQTLDEAARLITLIKDDEKLSDQLADLLPEASDKAITQLCELDFTTAAKISLEAMYRILPHMNQGMGFFDACQQESLPEIGVPPAGDRVPPFDEMYNPVVNRVLSQSRKLINAVIDEYGMPAKIRVELARDLGKGRELRERIKLDQLDKSKQNDQRAEDFRAEFQQAPRGDQSLRYRLWKEQNCTCPYSGRMIPVNSVLSEDTQIDHILPISQSFDNSLSNKVLCFTEENAQKSNRTPFEYLDAADFQRLEAISGNWPEAKRNKLLHKSFGKVAEEWKSRALNDTRYLTSALADHLRHHLPDSKIQTVNGRITGYLRKQWGLEKDRDKHTHHAVDAIVVACTTPAIVQQVTLYHQDIRRYKKLGEKRPTPWPETFRQDVLDVEEEIFITRQPKKVSGGIQTKDTLRKHRSKPDRQRVALTKVKLADLERLVEKDASNRNLYEHLKQCLEESGDQPTKAFKAPFYMPSGPEAKQRPILSKVTLLREKPEPPKQLTELSGGRRYDSMAQGRLDIYRYKPGGKRKDEYRVVLQRMIDLMRGEENVHVFQKGVPYDQGPEIEQNYTFLFSLYFDDLVEFQRSADSEVIRGYYRTFNIANGQLKISTYLEGRQDFDFFGANRLAHFAKVQVNLLGKVIK

SEQ ID NO: 814 - protein, 1011 aa, uncultured delta proteobacterium HF0070_07E19; identical to SEQ ID NO: 813

SEQ ID NO: 815 - protein, 1120 aa, Veillonella sp.
MGFKANLVNLFTDEDIEVILPEEKEFKSINLHEGIYEDVRDAYEDAWGDRFAIVDQCKVLHDIIVISSIIKPGQSLSEAKIESYNQHKEDLVLLKSVLKEDRKLYDDMFVVDTDKGTNYVKYTKQGVNGNTSATQEEFYKYVRKVVSVLPETEHTRRIVQKLEEGTFLPLQRISKNGVVPYQLHKEELVRILDKATVNFPFLNKVENGLTVADKIISILEFKIPYYVGPLNPTHSIENGGFAWVVRKEAGQVLPWNFEQKVDVQASAVKFIENLTNKCTYLIDQDVLPKYSLLYAEFSLLNELNNIRVNDKPLPADVKQAFIRDHFISLQDSKTATKKVVAKYLVDNNYVSQPPIITGMDQQIATKLTSHRDMTRILGEHFDHAMAEDIIRYITIFGESKDMLRQVLKNYYGDRLTTEQIKKLGKLTYTGWGRLSKKFLSDIWGMKKNDDDAEAGTIIEHMREGQENLMQLLSSSYSFIDVVQEYVTNVLGEKEKTAFEMLEDLSLSPMVKRSVWQTLRILDEIVSIRKELPKKIFVEVARTNKADKKRTQSRKALLEELYKQIKDEDVHVLQQELESKEDSALNSKKLYLYFTQMGRCMYSGRRIDIHELFTDKYDIDHIYPRSLTKDDSWHNIVLVEKQLNAEKTDRFPILSAIQSKQKGFWKLLWDRGFISEKKYDRLVRTTDLTDEELNQFINRQMVSTNQSVKAVTTLLHQLYPETEVVFSKAENVSDFRHDYDFVKVRSINHHHHAKDAYLNIVVGNVYHEKFTKNFLSFAKQKGTRRTYNLTKIFEYEIKLTEESKKVIWDPNIHMDIVKKMMKSNDVRVTQRAVPQKGGLSDETIYKKGIAKRGVYLPLKSSDERVRDVEKYGGRTSITISEYIILNIRDTSDQDRIEIFSLPLYIAGKKDIHKAIEEAYLSTCKKPASVVDIQILYRGLYIGSKVNINGFTYYMGGKTGSNVSIDSAVDVVMDITSSVYIKLLEKVAIKKIENPKTFRIENIKTSYNHKEVTVSKEQNIALYQELLKKLDTPLFSKMKGNKLEEFRTVGFDTFIALSLEEQASVLLEVLNVLTNFKTKRDITKIGMTSSRSTLGINISNTEQFSVITTSITGLYEQEIKIK

SEQ ID NO: 816 - protein, 983 aa, Verminephrobacter aporrectodeae
MRRRRDRLLKRKARMHDQLMRHGFFPADAAGRKVLERLNPYQLRAKGLHQALTPGEFARALFHINQRRGFQSNRKTDRKDNESGALKQAISELRAQIHDSGCATVGEWFWKERMQQKPEGVHRQGVRARYRETPYTTDEGRQRIDKRYDLYVDRAMIEQEFDALWAVQAALQPGLFTDAACKELRYTLLFQRKLRPVKPGRCTLLPEEERAPLALPSTQRFRILQEVNHLRLLDEALREVPLTLAQRDALVAALESQGKLGFAPMRKLLKLPGTVKFNLEDEKRTELKGNATSAILARKDLFGPAWAGFDAALQDEIVWQLVSEEGEGRLIAWLQQHTGVDEARAEAIADTSLPEGYGSLSRKALERIVPALQREVCSYDKAVQAAGFAHHSDLGFDFEHSGDEVQQVGERIIASTGEVRPLFAFKQLPYYGKALQRHVAFGSGKPEDPEEKRHGKIANPTVHIGLNQVRTVVNALIRRYGRPSEVVVELARDLKQSREQQQETQRKQAENQRRNTRIRERIAETLGISPERVRSSDIQKWILWEELSFDVVDRRCPYSGEQISTTMLLSPKVEIEHILPFSQTLDDSLNNRTVALREANRIKRNRTPWDARADFEARGWSYEGILHRAERMPLRKRYRFAPDGYQRWLGEDKDFLARALNDTRYLSRVAANYLRLVCPKPQGVRVIPGRMTAMLRAKFGLNDVLGLDGEKNRNDHRHHAVDACVIGVTDQGLMQRFARASAQAREDGLTRLVQDMPLPWPSYRDHVERAVRHIWVSHKPDHGFEGAMMEETAYGIRKDGSIKPRRKADGSAGREVVNLIRITESRQPVRHGVDSQGQPLPYKGYVGGSNYCIEITANDQGKWEGAVISTFEAYRIVRASGWGRLRHCSHGQNGRPLMMRLMIGDAVRLALDGSEKTMRVVKISANGQVFLVAPNEANVDARNRDKADPFAYVSKKAGSFQSAKARQVSISPIGELRDPGFKG

SEQ ID NO: 817 - protein, 4 aa, Artificial sequence
  Synthetic Sequence
AAAA

SEQ ID NO: 818 - protein, 1300 aa, Francisella tularensis
MSIYQEFVNKYSLSKTLRFELIPQGKTLENIKARGLILDDEKRAKDYKKAKQIIDKYHQFFIEEILSSVCISEDLLQNYSDVYFKLKKSDDDNLQKDFKSAKDTIKKQISEYIKDSEKFKNLFNQNLIDAKKGQESDLILWLKQSKDNGIELFKANSDITDIDEALEIIKSFKGWTTYFKGFHENRKNVYSSNDIPTSIIYRIVDDNLPKFLENKAKYESLKDKAPEAINYEQIKKDLAEELTFDIDYKTSEVNQRVFSLDEVFEIANFNNYLNQSGITKFNTIIGGKFVNGENTKRKGINEYINLYSQQINDKTLKKYKMSVLFKQILSDTESKSFVIDKLEDDSDVVTTMQSFYEQIAAFKTVEEKSIKETLSLLFDDLKAQKLDLSKIYFKNDKSLTDLSQQVFDDYSVIGTAVLEYITQQIAPKNLDNPSKKEQELIAKKTEKAKYLSLETIKLALEEFNKHRDIDKQCRFEEILANFAAIPMIFDEIAQNKDNLAQISIKYQNQGKKDLLQASAEDDVKAIKDLLDQTNNLLHKLKIFHISQSEDKANILDKDEHFYLVFEECYFELANIVPLYNKIRNYITQKPYSDEKFKLNFENSTLANGWDKNKEPDNTAILFIKDDKYYLGVMNKKNNKIFDDKAIKENKGEGYKKIVYKLLPGANKMLPKVFFSAKSIKFYNPSEDILRIRNHSTHTKNGSPQKGYEKFEFNIEDCRKFIDFYKQSISKHPEWKDFGFRFSDTQRYNSIDEFYREVENQGYKLTFENISESYIDSVVNQGKLYLFQIYNKDFSAYSKGRPNLHTLYWKALFDERNLQDVVYKLNGEAELFYRKQSIPKKITHPAKEAIANKNKDNPKKESVFEYDLIKDKRFTEDKFFFHCPITINFKSSGANKFNDEINLLLKEKANDVHILSIDRGERHLAYYTLVDGKGNIIKQDTFNIIGNDRMKTNYHDKLAAIEKDRDSARKDWKKINNIKEMKEGYLSQVVHEIAKLVIEYNAIVVFEDLNFGFKRGRFKVEKQVYQKLEKMLIEKLNYLVFKDNEFDKTGGVLRAYQLTAPFETFKKMGKQTGIIYYVPAGFTSKICPVTGFVNQLYPKYESVSKSQEFFSKFDKICYNLDKGYFEFSFDYKNFGDKAAKGKWTIASFGSRLINFRNSDKNHNWDTREVYPTKELEKLLKDYSIEYGHGECIKAAICGESDKKFFAKLTSVLNTILQMRNSKTGTELDYLISPVADVNGNFFDSRQAPKNMPQDADANGAYHIGLKGLMLLGRIKNNQEGKKLNLVIKNEEYFEFVQNRNN

SEQ ID NO: 819 - protein, 1307 aa, unknown
  Synthetic Sequence
MTQFEGFTNLYQVSKTLRFELIPQGKTLKHIQEQGFIEEDKARNDHYKELKPIIDRIYKTYADQCLQLVQLDWENLSAAIDSYRKEKTEETRNALIEEQATYRNAIHDYFIGRTDNLTDAINKRHAEIYKGLFKAELFNGKVLKQLGTVTTTEHENALLRSFDKFTTYFSGFYENRKNVFSAEDISTAIPHRIVQDNFPKFKENCHIFTRLITAVPSLREHFENVKKAIGIFVSTSIEEVFSFPFYNQLLTQTQIDLYNQLLGGISREAGTEKIKGLNEVLNLAIQKNDETAHIIASLPHRFIPLFKQILSDRNTLSFILEEFKSDEEVIQSFCKYKTLLRNENVLETAEALFNELNSIDLTHIFISHKKLETISSALCDHWDTLRNALYERRISELTGKITKSAKEKVQRSLKHEDINLQEIISAAGKELSEAFKQKTSEILSHAHAALDQPLPTTLKKQEEKEILKSQLDSLLGLYHLLDWFAVDESNEVDPEFSARLTGIKLEMEPSLSFYNKARNYATKKPYSVEKFKLNFQMPTLASGWDVNKEKNNGAILFVKNGLYYLGIMPKQKGRYKALSFEPTEKTSEGFDKMYYDYFPDAAKMIPKCSTQLKAVTAHFQTHTTPILLSNNFIEPLEITKEIYDLNNPEKEPKKFQTAYAKKTGDQKGYREALCKWIDFTRDFLSKYTKTTSIDLSSLRPSSQYKDLGEYYAELNPLLYHISFQRIAEKEIMDAVETGKLYLFQIYNKDFAKGHHGKPNLHTLYWTGLFSPENLAKTSIKLNGQAELFYRPKSRMKRMAHRLGEKMLNKKLKDQKTPIPDTLYQELYDYVNHRLSHDLSDEARALLPNVITKEVSHEIIKDRRFTSDKFFFHVPITLNYQAANSPSKFNQRVNAYLKEHPETPIIGIDRGERNLIYITVIDSTGKILEQRSLNTIQQFDYQKKLDNREKERVAARQAWSVVGTIKDLKQGYLSQVIHEIVDLMIHYQAVVVLENLNFGFKSKRTGIAEKAVYQQFEKMLIDKLNCLVLKDYPAEKVGGVLNPYQLTDQFTSFAKMGTQSGFLFYVPAPYTSKIDPLTGFVDPFVWKTIKNHESRKHFLEGFDFLHYDVKTGDFILHFKMNRNLSFQRGLPGFMPAWDIVFEKNETQFDAKGTPFIAGKRIVPVIENHRFTGRYRDLYPANELIALLEEKGIVFRDGSNILPKLLENDDSHAIDTMVALIRSVLQMRNSNAATGEDYINSPVRDLNGVCFDSRFQNPEWPMDADANGAYHIALKGQLLLNHLKESKDLKLQNGISNQDWLAYIQELRN

SEQ ID NO: 820 - protein, 1246 aa, unknown
  Synthetic Sequence
MLKNVGIDRLDVEKGRKNMSKLEKFTNCYSLSKTLRFKAIPVGKTQENIDNKRLLVEDEKRAEDYKGVKKLLDRYYLSFINDVLHSIKLKNLNNYISLFRKKTRTEKENKELENLEINLRKEIAKAFKGNEGYKSLFKKDIIETILPEFLDDKDEIALVNSFNGFTTAFTGFFDNRENMFSEEAKSTSIAFRCINENLTRYISNMDIFEKVDAIFDKHEVQEIKEKILNSDYDVEDFFEGEFFNFVLTQEGIDVYNAIIGGFVTESGEKIKGLNEYINLYNQKTKQKLPKFKPLYKQVLSDRESLSFYGEGYTSDEEVLEVFRNTLNKNSEIFSSIKKLEKLFKNFDEYSSAGIFVKNGPAISTISKDIFGEWNVIRDKWNAEYDDIHLKKKAVVTEKYEDDRRKSFKKIGSFSLEQLQEYADADLSVVEKLKEIIIQKVDEIYKVYGSSEKLFDADFVLEKSLKKNDAVVAIMKDLLDSVKSFENYIKAFFGEGKETNRDESFYGDFVLAYDILLKVDHIYDAIRNYVTQKPYSKDKFKLYFQNPQFMGGWDKDKETDYRATILRYGSKYYLAIMDKKYAKCLQKIDKDDVNGNYEKINYKLLPGPNKMLPKVFFSKKWMAYYNPSEDIQKIYKNGTFKKGDMFNLNDCHKLIDFFKDSISRYPKWSNAYDFNFSETEKYKDIAGFYREVEEQGYKVSFESASKKEVDKLVEEGKLYMFQIYNKDFSDKSHGTPNLHTMYFKLLFDENNHGQIRLSGGAELFMRRASLKKEELVVHPANSPIANKNPDNPKKTTTLSYDVYKDKRFSEDQYELHIPIAINKCPKNIFKINTEVRVLLKHDDNPYVIGIDRGERNLLYIVVVDGKGNIVEQYSLNEIINNFNGIRIKTDYHSLLDKKEKERFEARQNWTSIENIKELKAGYISQVVHKICELVEKYDAVIALEDLNSGFKNSRVKVEKQVYQKFEKMLIDKLNYMVDKKSNPCATGGALKGYQITNKFESFKSMSTQNGFIFYIPAWLTSKIDPSTGFVNLLKTKYTSIADSKKFISSFDRIMYVPEEDLFEFALDYKNFSRTDADYIKKWKLYSYGNRIRIFRNPKKNNVFDWEEVCLTSAYKELFNKYGINYQQGDIRALLCEQSDKAFYSSFMALMSLMLQMRNSITGRTDVDFLISPVKNSDGIFYDSRNYEAQENAILPKNADANGAYNIARKVLWAIGQFKKAEDEKLDKVKIAISNKEWLEYAQTSVKH

SEQ ID NO: 821 - protein, 1246 aa, Porphyromonas macacae
MKTQHFFEDFTSLYSLSKTIRFELKPIGKTLENIKKNGLIRRDEQRLDDYEKLKKVIDEYHEDFIANILSSFSFSEEILQSYIQNLSESEARAKIEKTMRDTLAKAFSEDERYKSIFKKELVKKDIPVWCPAYKSLCKKFDNFTTSLVPFHENRKNLYTSNEITASIPYRIVHVNLPKFIQNIEALCELQKKMGADLYLEMMENLRNVWPSFVKTPDDLCNLKTYNHLMVQSSISEYNRFVGGYSTEDGTKHQGINEWINIYRQRNKEMRLPGLVFLHKQILAKVDSSSFISDTLENDDQVFCVLRQFRKLFWNTVSSKEDDAASLKDLFCGLSGYDPEAIYVSDAHLATISKNIFDRWNYISDAIRRKTEVLMPRKKESVERYAEKISKQIKKRQSYSLAELDDLLAHYSEESLPAGFSLLSYFTSLGGQKYLVSDGEVILYEEGSNIWDEVLIAFRDLQVILDKDFTEKKLGKDEEAVSVIKKALDSALRLRKFFDLLSGTGAEIRRDSSFYALYTDRMDKLKGLLKMYDKVRNYLTKKPYSIEKFKLHFDNPSLLSGWDKNKELNNLSVIFRQNGYYYLGIMTPKGKNLFKTLPKLGAEEMFYEKMEYKQIAEPMLMLPKVFFPKKTKPAFAPDQSVVDIYNKKTFKTGQKGFNKKDLYRLIDFYKEALTVHEWKLFNFSFSPTEQYRNIGEFFDEVREQAYKVSMVNVPASYIDEAVENGKLYLFQIYNKDFSPYSKGIPNLHTLYWKALFSEQNQSRVYKLCGGGELFYRKASLHMQDTTVHPKGISIHKKNLNKKGETSLFNYDLVKDKRFTEDKFFFHVPISINYKNKKITNVNQMVRDYIAQNDDLQIIGIDRGERNLLYISRIDTRGNLLEQFSLNVIESDKGDLRTDYQKILGDREQERLRRRQEWKSIESIKDLKDGYMSQVVHKICNMVVEHKAIVVLENLNLSFMKGRKKVEKSVYEKFERMLVDKLNYLVVDKKNLSNEPGGLYAAYQLTNPLFSFEELHRYPQSGILFFVDPWNTSLTDPSTGFVNLLGRINYTNVGDARKFFDRFNAIRYDGKGNILFDLDLSRFDVRVETQRKLWTLTTFGSRIAKSKKSGKWMVERIENLSLCFLELFEQFNIGYRVEKDLKKAILSQDRKEFYVRLIYLFNLMMQIRNSDGEEDYILSPALNEKNLQFDSRLIEAKDLPVDADANGAYNVARKGLMVVQRIKRGDHESIHRIGRAQWLRYVQEGIVE

SEQ ID NO: 822 - protein, 1326 aa, Prevotella disiens
MKVMENYQEFTNLFQLNKTLRFELKPIGKTCELLEEGKIFASGSFLEKDKVRADNVSYVKKEIDKKHKIFIEETLSSFSISNDLLKQYFDCYNELKAFKKDCKSDEEEVKKTALRNKCTSIQRAMREAISQAFLKSPQKKLLAIKNLIENVFKADENVQHFSEFTSYFSGFETNRENFYSDEEKSTSIAYRLVHDNLPIFIKNIYIFEKLKEQFDAKTLSEIFENYKLYVAGSSLDEVFSLEYFNNTLTQKGIDNYNAVIGKIVKEDKQEIQGLNEHINLYNQKHKDRRLPFFISLKKQILSDREALSWLPDMFKNDSEVIKALKGFYIEDGFENNVLTPLATLLSSLDKYNLNGIFIRNNEALSSLSQNVYRNFSIDEAIDANAELQTFNNYELIANALRAKIKKETKQGRKSFEKYEEYIDKKVKAIDSLSIQEINELVENYVSEFNSNSGNMPRKVEDYFSLMRKGDFGSNDLIENIKTKLSAAEKLLGTKYQETAKDIFKKDENSKLIKELLDATKQFQHFIKPLLGTGEEADRDLVFYGDFLPLYEKFEELTLLYNKVRNRLTQKPYSKDKIRLCFNKPKLMTGWVDSKTEKSDNGTQYGGYLFRKKNEIGEYDYFLGISSKAQLFRKNEAVIGDYERLDYYQPKANTIYGSAYEGENSYKEDKKRLNKVIIAYIEQIKQTNIKKSIIESISKYPNISDDDKVTPSSLLEKIKKVSIDSYNGILSFKSFQSVNKEVIDNLLKTISPLKNKAEFLDLINKDYQIFTEVQAVIDEICKQKTFIYFPISNVELEKEMGDKDKPLCLFQISNKDLSFAKTFSANLRKKRGAENLHTMLFKALMEGNQDNLDLGSGAIFYRAKSLDGNKPTHPANEAIKCRNVANKDKVSLFTYDIYKNRRYMENKFLFHLSIVQNYKAANDSAQLNSSATEYIRKADDLHIIGIDRGERNLLYYSVIDMKGNIVEQDSLNIIRNNDLETDYHDLLDKREKERKANRQNWEAVEGIKDLKKGYLSQAVHQIAQLMLKYNAIIALEDLGQMFVTRGQKIEKAVYQQFEKSLVDKLSYLVDKKRPYNELGGILKAYQLASSITKNNSDKQNGFLFYVPAWNTSKIDPVTGFTDLLRPKAMTIKEAQDFFGAFDNISYNDKGYFEFETNYDKFKIRMKSAQTRWTICTFGNRIKRKKDKNYWNYEEVELTEEFKKLFKDSNIDYENCNLKEEIQNKDNRKFFDDLIKLLQLTLQMRNSDDKGNDYIISPVANAEGQFFDSRNGDKKLPLDADANGAYNIARKGLWNIRQIKQTKNDKKLNLSISSTEWLDFVREKPYLK

SEQ ID NO: 823 - protein, 1129 aa, Alicyclobacillus acidoterrestris
MAVKSIKVKLRLDDMPEIRAGLWKLHKEVNAGVRYYTEWLSLLRQENLYRRSPNGDGEQECDKTAEECKAELLERLRARQVENGHRGPAGSDDELLQLARQLYELLVPQAIGAKGDAQQIARKFLSPLADKDAVGGLGIAKAGNKPRWVRMREAGEPGWEEEKEKAETRKSADRTADVLRALADFGLKPLMRVYTDSEMSSVEWKPLRKGQAVRTWDRDMFQQAIERMMSWESWNQRVGQEYAKLVEQKNRFEQKNFVGQEHLVHLVNQLQQDMKEASPGLESKEQTAHYVTGRALRGSDKVFEKWGKLAPDAPFDLYDAEIKNVQRRNTRRFGSHDLFAKLAEPEYQALWREDASFLTRYAVYNSILRKLNHAKMFATFTLPDATAHPIWTRFDKLGGNLHQYTFLFNEFGERRHAIRFHKLLKVENGVAREVDDVTVPISMSEQLDNLLPRDPNEPIALYFRDYGAEQHFTGEFGGAKIQCRRDQLAHMHRRRGARDVYLNVSVRVQSQSEARGERRPPYAAVFRLVGDNHRAFVHFDKLSDYLAEHPDDGKLGSEGLLSGLRVMSVDLGLRTSASISVFRVARKDELKPNSKGRVPFFFPIKGNDNLVAVHERSQLLKLPGETESKDLRAIREERQRTLRQLRTQLAYLRLLVRCGSEDVGRRERSWAKLIEQPVDAANHMTPDWREAFENELQKLKSLHGICSDKEWMDAVYESVRRVWRHMGKQVRDWRKDVRSGERPKIRGYAKDVVGGNSIEQIEYLERQYKFLKSWSFFGKVSGQVIRAEKGSRFAITLREHIDHAKEDRLKKLADRIIMEALGYVYALDERGKGKWVAKYPPCQLILLEELSEYQFNNDRPPSENNQLMQWSHRGVFQELINQAQVHDLLVGTMYAAFSSRFDARTGAPGIRCRRVPARCTQEHNPEPFPWWLNKFVVEHTLDACPLRADDLIPTGEGEIFVSPFSAEEGDFHQIHADLNAAQNLQQRLWSDFDISQIRLRCDWGEVDGELVLIPRLTGKRTADSYSNKVFYTNTGVTYYERERGKKRRKVFAQEKLSEEEAELLVEADEAREKSVVLMRDPSGIINRGNWTRQKEFWSMVNQRIEGYLVKQIRSRVPLQDSACENTGDI

SEQ ID NO: 824 - protein, 872 aa, Alicyclobacillus contaminans
MGFNTAELLRKVEEEMRKTSVGFDTDNPFAHRITRRAIRGWDRIAEAWRRLPPDAPESEYIEAFKDIQRKNPRKIGSEPLFKNLAAPGVRSELLNNPQVLITFAKYNELQRQLAKAKQFAQKTLPHPVFHPVWVRYDKLGGNLHHYQIEPAVHANDTHKVKFSSLLLPQEDGSYAEVKDVTVSLAPSLQFPTGLVHPKVTTPPRTGLVTVMDEEAGKPVVCYRDRGHDALVPVAFGGAKLQFNRAHLSAGYRKGVLSAGGGGSIYFNVTLDVQVPNERDVSKTFSFSRDRDLVSLKAEELKRYMETKPLGMPGVRVMSVDLGVRYGAAISVFEVKPFAEVRKDKLHYPITGCEGFVAEHERSVILKLPGEGVRTAGKQSERKQALAAIRAEMSILRKWLRVSQVTEEDRAKAVRGLLEDERGGGWTMDPGEDSDHQPLQQFLHEARLAVGELVNLVHLSPAEWERAVIERHRRLERITASHIRVFQTMRKVWGKRRNEDAAHTGGISLAHIEHLIQQRKLFIRWSTHARTYGEVRRLPKHEGFAKRLQKHTNHVKEDRIKKLADMIVMAARGYRFLDKRARWVKTRHAPCDLILFEDLSRYRFTMDRPPTENSQLMNWSHRELLKTVKMQAALFGIGVGTVPAAFTSRFDAQTGAPGLRCKRVTKQDKEKTPFWLIQFAEITGVNVTNVEPGQLIPVDGGEWFVSPKGPRAADGLKCVHADINAAHNLQRRFWIPRLPSVKCRRYVEAEGFAAVPSSTAFMKVHGKGAFVSVDGEFYEYQKGRRVAVNRADRTSSTLDEDEGDIGEEMLVSSNGAGEFVRMFYDESGYVGYGRWMDSKVFWGKVRQIVHRAIQDQVEKRAAARGENGATSSR

SEQ ID NO: 825 - protein, 1149 aa, Desulfovibrio inopinatus
MPTRTINLKLVLGKNPENATLRRALFSTHRLVNQATKRIEEFLLLCRGEAYRTVDNEGKEAEIPRHAVQEEALAFAKAAQRHNGCISTYEDQEILDVLRQLYERLVPSVNENNEAGDAQAANAWVSPLMSAESEGGLSVYDKVLDPPPVWMKLKEEKAPGWEAASQIWIQSDEGQSLLNKPGSPPRWIRKLRSGQPWQDDFVSDQKKKQDELTKGNAPLIKQLKEMGLLPLVNPFFRHLLDPEGKGVSPWDRLAVRAAVAHFISWESWNHRTRAEYNSLKLRRDEFEAASDEFKDDFTLLRQYEAKRHSTLKSIALADDSNPYRIGVRSLRAWNRVREEWIDKGATEEQRVTILSKLQTQLRGKFGDPDLFNWLAQDRHVHLWSPRDSVTPLVRINAVDKVLRRRKPYALMTFAHPRFHPRWILYEAPGGSNLRQYALDCTENALHITLPLLVDDAHGTWIEKKIRVPLAPSGQIQDLTLEKLEKKKNRLYYRSGFQQFAGLAGGAEVLFHRPYMEHDERSEESLLERPGAVWFKLTLDVATQAPPNWLDGKGRVRTPPEVHHFKTALSNKSKHTRTLQPGLRVLSVDLGMRTFASCSVFELIEGKPETGRAFPVADERSMDSPNKLWAKHERSFKLTLPGETPSRKEEEERSIARAEIYALKRDIQRLKSLLRLGEEDNDNRRDALLEQFFKGWGEEDVVPGQAFPRSLFQGLGAAPFRSTPELWRQHCQTYYDKAEACLAKHISDWRKRTRPRPTSREMWYKTRSYHGGKSIWMLEYLDAVRKLLLSWSLRGRTYGAINRQDTARFGSLASRLLHHINSLKEDRIKTGADSIVQAARGYIPLPHGKGWEQRYEPCQLILFEDLARYRFRVDRPRRENSQLMQWNHRAIVAETTMQAELYGQIVENTAAGFSSRFHAATGAPGVRCRFLLERDFDNDLPKPYLLRELSWMLGNTKVESEEEKLRLLSEKIRPGSLVPWDGGEQFATLHPKRQTLCVIHADMNAAQNLQRRFFGRCGEAFRLVCQPHGDDVLRLASTPGARLLGALQQLENGQGAFELVRDMGSTSQMNRFVMKSLGKKKIKPLQDNNGDDELEDVLSVLPEEDDTGRITVFRDSSGIFFPCNVWIPAKQFWPAVRAMIWKVMASHSLG

SEQ ID NO: 826 - protein, 1194 aa, Desulfonatronum thiodismutans
MVLGRKDDTAELRRALWTTHEHVNLAVAEVERVLLRCRGRSYWTLDRRGDPVHVPESQVAEDALAMAREAQRRNGWPVVGEDEEILLALRYLYEQIVPSCLLDDLGKPLKGDAQKIGTNYAGPLFDSDTCRRDEGKDVACCGPFHEVAGKYLGALPEWATPISKQEFDGKDASHLRFKATGGDDAFFRVSIEKANAWYEDPANQDALKNKAYNKDDWKKEKDKGISSWAVKYIQKQLQLGQDPRTEVRRKLWLELGLLPLFIPVFDKTMVGNLWNRLAVRLALAHLLSWESWNHRAVQDQALARAKRDELAALFLGMEDGFAGLREYELRRNESIKQHAFEPVDRPYVVSGRALRSWTRVREEWLRHGDTQESRKNICNRLQDRLRGKFGDPDVFHWLAEDGQEALWKERDCVTSFSLLNDADGLLEKRKGYALMTFADARLHPRWAMYEAPGGSNLRTYQIRKTENGLWADVVLLSPRNESAAVEEKTFNVRLAPSGQLSNVSFDQIQKGSKMVGRCRYQSANQQFEGLLGGAEILFDRKRIANEQHGATDLASKPGHVWFKLTLDVRPQAPQGWLDGKGRPALPPEAKHFKTALSNKSKFADQVRPGLRVLSVDLGVRSFAACSVFELVRGGPDQGTYFPAADGRTVDDPEKLWAKHERSFKITLPGENPSRKEEIARRAAMEELRSLNGDIRRLKAILRLSVLQEDDPRTEHLRLFMEAIVDDPAKSALNAELFKGFGDDRFRSTPDLWKQHCHFFHDKAEKVVAERFSRWRTETRPKSSSWQDWRERRGYAGGKSYWAVTYLEAVRGLILRWNMRGRTYGEVNRQDKKQFGTVASALLHHINQLKEDRIKTGADMIIQAARGFVPRKNGAGWVQVHEPCRLILFEDLARYRFRTDRSRRENSRLMRWSHREIVNEVGMQGELYGLHVDTTEAGFSSRYLASSGAPGVRCRHLVEEDFHDGLPGMHLVGELDWLLPKDKDRTANEARRLLGGMVRPGMLVPWDGGELFATLNAASQLHVIHADINAAQNLQRRFWGRCGEAIRIVCNQLSVDGSTRYEMAKAPKARLLGALQQLKNGDAPFHLTSIPNSQKPENSYVMTPTNAGKKYRAGPGEKSSGEEDELALDIVEQAEELAQGRKTFFRDPSGVFFAPDRWLPSEIYWSRIRRRIWQVTLERNSSGRQERAEMDEMPY

SEQ ID NO: 827 - protein, 1132 aa, Tuberibacillus calidus
MATKSFILKMKTKNNPQLRLSLWKTHELFNFGVAYYMDLLSLFRQKDLYMHNDEDPDHPVVLKKEEIQERLWMKVRETQQKNGFHGEVSKDEVLETLRALYEELVPSAVGKSGEANQISNKYLYPLTDPASQSGKGTANSGRKPRWKKLKEAGDPSWKDAYEKWEKERQEDPKLKILAALQSFGLIPLFRPFTENDHKAVISVKWMPKSKNQSVRKFDKDMFNQAIERFLSWESWNEKVAEDYEKTVSIYESLQKELKGISTKAFEIMERVEKAYEAHLREITFSNSTYRIGNRAIRGWTEIVKKWMKLDPSAPQGNYLDVVKDYQRRHPRESGDFKLFELLSRPENQAAWREYPEFLPLYVKYRHAEQRMKTAKKQATFTLCDPIRHPLWVRYEERSGTNLNKYRLIMNEKEKVVQFDRLICLNADGHYEEQEDVTVPLAPSQQFDDQIKFSSEDTGKGKHNFSYYHKGINYELKGTLGGARIQFDREHLLRRQGVKAGNVGRIFLNVTLNIEPMQPFSRSGNLQTSVGKALKVYVDGYPKVVNFKPKELTEHIKESEKNTLTLGVESLPTGLRVMSVDLGQRQAAAISIFEVVSEKPDDNKLFYPVKDTDLFAVHRTSFNIKLPGEKRTERRMLEQQKRDQAIRDLSRKLKFLKNVLNMQKLEKTDEREKRVNRWIKDREREEENPVYVQEFEMISKVLYSPHSVWVDQLKSIHRKLEEQLGKEISKWRQSISQGRQGVYGISLKNIEDIEKTRRLLFRWSMRPENPGEVKQLQPGERFAIDQQNHLNHLKDDRIKKLANQIVMTALGYRYDGKRKKWIAKHPACQLVLFEDLSRYAFYDERSRLENRNLMRWSRREIPKQVAQIGGLYGLLVGEVGAQYSSRFHAKSGAPGIRCRVVKEHELYITEGGQKVRNQKFLDSLVENNIIEPDDARRLEPGDLIRDQGGDKFATLDERGELVITHADINAAQNLQKRFWTRTHGLYRIRCESREIKDAVVLVPSDKDQKEKMENLFGIGYLQPFKQENDVYKWVKGEKIKGKKTSSQSDDKELVSEILQEASVMADELKGNRKTLFRDPSGYVFPKDRWYTGGRYFGTLEHLLKRKLAERRLFDGGSSRRGLFNGTDSNTNVE

SEQ ID NO: 828 - protein, 1108 aa, Bacillus thermoamylovorans
MATRSFILKIEPNEEVKKGLWKTHEVLNHGIAYYMNILKLIRQEAIYEHHEQDPKNPKKVSKAEIQAELWDFVLKMQKCNSFTHEVDKDVVFNILRELYEELVPSSVEKKGEANQLSNKFLYPLVDPNSQSGKGTASSGRKPRWYNLKIAGDPSWEEEKKKWEEDKKKDPLAKILGKLAEYGLIPLFIPFTDSNEPIVKEIKWMEKSRNQSVRRLDKDMFIQALERFLSWESWNLKVKEEYEKVEKEHKTLEERIKEDIQAFKSLEQYEKERQEQLLRDTLNTNEYRLSKRGLRGWREIIQKWLKMDENEPSEKYLEVFKDYQRKHPREAGDYSVYEFLSKKENHFIWRNHPEYPYLYATFCEIDKKKKDAKQQATFTLADPINHPLWVRFEERSGSNLNKYRILTEQLHTEKLKKKLTVQLDRLIYPTESGGWEEKGKVDIVLLPSRQFYNQIFLDIEEKGKHAFTYKDESIKFPLKGTLGGARVQFDRDHLRRYPHKVESGNVGRIYFNMTVNIEPTESPVSKSLKIHRDDFPKFVNFKPKELTEWIKDSKGKKLKSGIESLEIGLRVMSIDLGQRQAAAASIFEVVDQKPDIEGKLFFPIKGTELYAVHRASFNIKLPGETLVKSREVLRKAREDNLKLMNQKLNFLRNVLHFQQFEDITEREKRVTKWISRQENSDVPLVYQDELIQIRELMYKPYKDWVAFLKQLHKRLEVEIGKEVKHWRKSLSDGRKGLYGISLKNIDEIDRTRKFLLRWSLRPTEPGEVRRLEPGQRFAIDQLNHLNALKEDRLKKMANTIIMHALGYCYDVRKKKWQAKNPACQIILFEDLSNYNPYEERSRFENSKLMKWSRREIPRQVALQGEIYGLQVGEVGAQFSSRFHAKTGSPGIRCSVVTKEKLQDNRFFKNLQREGRLTLDKIAVLKEGDLYPDKGGEKFISLSKDRKLVTTHADINAAQNLQKRFWTRTHGFYKVYCKAYQVDGQTVYIPESKDQKQKIIEEFGEGYFILKDGVYEWGNAGKLKIKKGSSKQSSSELVDSDILKDSFDLASELKGEKLMLYRDPSGNVFPSDKWMAAGVFFGKLERILISKLTNQYSISTIEDDSSKQSM

SEQ ID NO: 829 - protein, 1108 aa, unknown
  Synthetic Sequence
MAIRSIKLKLKTHTGPEAQNLRKGIWRTHRLLNEGVAYYMKMLLLFRQESTGERPKEELQEELICHIREQQQRNQADKNTQALPLDKALEALRQLYELLVPSSVGQSGDAQIISRKFLSPLVDPNSEGGKGTSKAGAKPTWQKKKEANDPTWEQDYEKWKKRREEDPTASVITTLEEYGIRPIFPLYTNTVTDIAWLPLQSNQFVRTWDRDMLQQAIERLLSWESWNKRVQEEYAKLKEKMAQLNEQLEGGQEWISLLEQYEENRERELRENMTAANDKYRITKRQMKGWNELYELWSTFPASASHEQYKEALKRVQQRLRGRFGDAHFFQYLMEEKNRLIWKGNPQRIHYFVARNELTKRLEEAKQSATMTLPNARKHPLWVRFDARGGNLQDYYLTAEADKPRSRRFVTFSQLIWPSESGWMEKKDVEVELALSRQFYQQVKLLKNDKGKQKIEFKDKGSGSTFNGHLGGAKLQLERGDLEKEEKNFEDGEIGSVYLNVVIDFEPLQEVKNGRVQAPYGQVLQLIRRPNEFPKVTTYKSEQLVEWIKASPQHSAGVESLASGFRVMSIDLGLRAAAATSIFSVEESSDKNAADFSYWIEGTPLVAVHQRSYMLRLPGEQVEKQVMEKRDERFQLHQRVKFQIRVLAQIMRMANKQYGDRWDELDSLKQAVEQKKSPLDQTDRTFWEGIVCDLTKVLPRNEADWEQAVVQIHRKAEEYVGKAVQAWRKRFAADERKGIAGLSMWNIEELEGLRKLLISWSRRTRNPQEVNRFERGHTSHQRLLTHIQNVKEDRLKQLSHAIVMTALGYVYDERKQEWCAEYPACQVILFENLSQYRSNLDRSTKENSTLMKWAHRSIPKYVHMQAEPYGIQIGDVRAEYSSRFYAKTGTPGIRCKKVRGQDLQGRRFENLQKRLVNEQFLTEEQVKQLRPGDIVPDDSGELFMTLTDGSGSKEVVFLQADINAAHNLQKRFWQRYNELFKVSCRVIVRDEEEYLVPKTKSVQAKLGKGLFVKKSDTAWKDVYVWDSQAKLKGKTTFTEESESPEQLEDFQEIIEEAEEAKGTYRTLFRDPSGVFFPESVWYPQKDFWGEVKRKLYGKLRERFLTKAR

SEQ ID NO: 830 - protein, 658 aa, Methylobacterium nodulans
MLTKQDKQQKITYCTNMNEVFEAKLGSADLLLNWDHLRGRIRDRVDAGDIGSAFLKLALDVAHVLPDGVDDQLARAAFHFQSAKGAKSKHADSVQAGLRVLSIDLGVRSFATCSVFELKDTAPTTGVAFPLAEFRLWAVHERSFTLELPGENVGAAGQQWRAQADAELRQLRGGLNRHRQLLRAATVQKGERDAYLTDLREAWSAKELWPFEASLLSELERCSTVADPLWQDTCKRAARLYRTEFGAVVSEWRSRTRSREDRKYAGKSMWSVQHLTDVRRFLQSWSLAGRASGDIRRLDRERGGVFAKDLLDHIDALKDDRLKTGADLIVQAARGFQRNEFGYWVQKHAPCHVILFEDLSRYRMRTDRPRRENSQLMQWAHRGVPDMVGMQGEIYGIQDRRDPDSARKHARQPLAAFCLDTPAAFSSRYHASTMTPGIRCHPLRKREFEDQGFLELLKRENEGLDLNGYKPGDLVPLPGGEVFVCLNANGLSRIHADINAAQNLQRRFWTQHGDAFRLPCGKSAVQGQIRWAPLSMGKRQAGALGGFGYLEPTGHDSGSCQWRKTTEAEWRRLSGAQKDRDEAAAAEDEELQGLEEELLERSGERVVFFRDPSGVVLPTDLWFPSAAFWSIVRAKTVGRLRSHLDAQAEASYAVAAGL

SEQ ID NO: 831 - protein, 1302 aa, unknown
  Synthetic Sequence
MKKFELKQNFRNNYSGKTLRNFRQTLAQIANKKSSDSILTIKFKLDCSKTGKLPKYENLISLYDTIEDIKKGTLSYYLFTLIVSGFKFFGSASQAKAFSTKDIFKDNDFYNQFKIQSHLDLPDFVPSKIYQRLKKNVRSTNGKDNAFKASVIVAEYRKEIGKLKNKDESSEHQCEELFKKIGTALETRFSSWQDLINNCSTGCEIIDEILNDSFGTLPSIKKMVLASTTQSSDGEQDGIAIAYDPDSTFIKSDELLNPYFAVATILKSMPPEIQQDKKSAYVKANLTTPTHNALSWIFGKGLTLFQTESTEKLCAMFNVSDKRVIEQVQDAAKAVKLPAELDLNHCTLKFQDFRSSLGGHLDSWTTNYLKRLDELNDLLLNLPKNLSLPDIFMIDGKDFIEYSGCNRDEIQQMIDFVVNEQNRIKLQESLNALLGKGNNQICSDDISTVKDFSEIVNSLHSFVQQIDNSLEQSSNEANSIFSELKKKIEKNEKWDIWKNNLKKIPKLNKLSGGVPDAWKEIREIEQKFHEISENQKKHFTEVMEWIDAGNGTIDIFESRFKYDELLKKSKKNNLQSADELAFRSVLNKLGRFARQGNDLVCEKIKNWFKEQNIFDSSKDFNRYFINQKGFIFKHPSSKKDNSPYNLSANLLEKRYEVTNTVGALLEQCESDPAIVNDPFSMRSLVEFRALWFSINISGISKEQHIPTKIAQPKLDDSTYQESVSPTLKYRLEKEQITSSELNSIFTVYKSLLSGLSIRLSRNSFYLRTKFSWIGNNSLIYCPKETTWKIPAAYFKSDLWNEYKDKQILIVNEEYDVDVVKTFESVYKIVKSKDNNEKNRILPLLKQLPHDWMFKLPFGASNAEKCKVLKLEKNNKKFKPLSVSKDSLARLSGPSTYFNQIDEIMMNDESELSEMTLLADEPVRQQMSNGKIEIIPDDYVMSLAIPITRSLKKGNTESFPFKNIVSIDQGEAGFAYAVFKLSDCGNERAEPIATGLIPIPSIRRLIHSVKKYRGKKQRIQNFNQKFDSTMFTLRENVTGDICGLIVALMKKYNAFPILEKQVGNLESGSKQLMLVYKAVNSKFLAAKVDMQNDQRRSWWYQGNSWNTPILRISNPNQSNNKNIVKNINGKKYEELKIYPGYSVSAYMTSCICHVCGRNALELLKNDDSTGKVKKYQINQDGEVTIGGEVIKLYRKPDRLTPVKNLAKKGNRERTYASINERAPTVSVQKAELSADELQKIIKKNMRRAPRSLMSKDTTQSRYFCVFKNCPCHNKEQHADVNAAINIGRRFLKDCILDDNKEKD

SEQ ID NO: 832 - protein, 1255 aa, unknown
  Synthetic Sequence
MRSNYHGGRNARQWRKQISGLARRTKETVFTYKFPLETDAAEIDFDKAVQTYGIAEGVGHGSLIGLVCAFHLSGFRLFSKAGEAMAFRNRSRYPTDAFAEKLSAIMGIQLPTLSPEGLDLIFQSPPRSRDGIAPVWSENEVRNRLYTNWTGRGPANKPDEHLLEIAGEIAKQVFPKFGGWDDLASDPDKALAAADKYFQSQGDFPSIASLPAAIMLSPANSTVDFEGDYIAIDPAAETLLHQAVSRCAARLGRERPDLDQNKGPFVSSLQDALVSSQNNGLSWLFGVGFQHWKEKSPKELIDEYKVPADQHGAVTQVKSFVDAIPLNPLFDTTHYGEFRASVAGKVRSWVANYWKRLLDLKSLLATTEFTLPESISDPKAVSLFSGLLVDPQGLKKVADSLPARLVSAEEAIDRLMGVGIPTAADIAQVERVADEIGAFIGQVQQFNNQVKQKLENLQDADDEEFLKGLKIELPSGDKEPPAINRISGGAPDAAAEISELEEKLQRLLDARSEHFQTISEWAEENAVTLDPIAAMVELERLRLAERGATGDPEEYALRLLLQRIGRLANRVSPVSAGSIRELLKPVFMEEREFNLFFHNRLGSLYRSPYSTSRHQPFSIDVGKAKAIDWIAGLDQISSDIEKALSGAGEALGDQLRDWINLAGFAISQRLRGLPDTVPNALAQVRCPDDVRIPPLLAMLLEEDDIARDVCLKAFNLYVSAINGCLFGALREGFIVRTRFQRIGTDQIHYVPKDKAWEYPDRLNTAKGPINAAVSSDWIEKDGAVIKPVETVRNLSSTGFAGAGVSEYLVQAPHDWYTPLDLRDVAHLVTGLPVEKNITKLKRLTNRTAFRMVGASSFKTHLDSVLLSDKIKLGDFTIIIDQHYRQSVTYGGKVKISYEPERLQVEAAVPVVDTRDRTVPEPDTLFDHIVAIDLGERSVGFAVFDIKSCLRTGEVKPIHDNNGNPVVGTVAVPSIRRLMKAVRSHRRRRQPNQKVNQTYSTALQNYRENVIGDVCNRIDTLMERYNAFPVLEFQIKNFQAGAKQLEIVYGSVLHRYTFSGVDAHKAKRREYWYNGELWEHPYLMAKKWNEETNSMSGAPKPVSLFPGVTVNAARTSQICHQCQRNPMSHLRGLTGTIEISSDGLLELDDGTIRLFETSDYDEDKFKQSRREKRRLDANVLLSGRHRAEYIYTVAKRNLRRPPKNVMTKDTTQSRYTCLYKNCSWTGHADENAAINIGRRYLAERIDMPASKTKAAV

SEQ ID NO: 833 - protein, 1266 aa, unknown
  Synthetic Sequence
MRPRFHGGMNARDWRKHVGVLAQQHKETTRTYTFPLDTTGSAIDFDAALQAYNAVEGVGYGSLLGLACAVHLSGFRLFSTGKEAATFRNRARYPNAAFQAALRKELGTTITTLTPETLDRLFSSRPKRRNGVPLPWNQDSIRDRLYTNWVKPRPGDTPDAVLFQIATGIAQEITEDVSSWTDLAKNSDRGLKAAHRYFARVGGFPAFDNLTPPATVQPTDTTIDYDPNAPFHLVSHADQTLIHQSISLCAHRIRQEDPALDPNKSGFIKQLQNNFLSQTFYGLSWLFGAGYVHFRECTANDLAIQYGIPNNCRDGIHQIKSFADAILPNTFFEKKHYRKDSRSVGKKAKSWISNYWQRLLQLQTWVDDHTWVTLPQELTEAQFKPLFRGLLVDAVELMAIAERLPQRLADCRDSLDCLMGKGPQAATKNDVEIVEKVREEIESFVGQIEQLGNQLRHQLENENNDQVHRDNLHQLKNRLPLDLRRPQALNKISGGVPDVAKSIRGLETQLDQVLKERRSHFGRLTKWAKECGITLDPLQPLIESEKQRVAERGSAHDAKELAIRLLLQRIGRLGHRLSPTNATAIQELLRPVFAVKREFNLFFHNHMGALYRSPYSTSRHQPFQINVDVAHGTDWIGTIETLIQNLFTQIQDDALLRDLVQLEGFVFSHKLRALPGVIPSELARPNNLQQMGLPALLLVLLQADQVHRETVLRVFNLYGSAINGYLFQALRPGFIVRAGFQRLETKKLRYVPKAQSWQYPDRLHHAKSAIKNSLSAGWIKKNHQGAILPQKTLTALVKQKSLKDTGVPEYLVQAPHDWYVPIDLRGPAIPIEGLTVGTEGPELTQLGPMKDDCAFRAIGPSSFKSKIDAGLLPQDVKYGDMTLIFDQHYQQSISFANGTFSIQYQPTSLQVKAAIPVVDKRPRDTRNNSHLYDRIVAIDLGERKIGYAIFDLKQVLKSEQLEPMREDGKPLIGSISIRSIRGLMKAVQTHRNRRQPNYRIDQTYSKALMHYRESVIGDVCNAIDTLCARYGGFPVLESSVRNFEVGSAQLKTVYGSVSRRYTWSAVDAHKNQRQQYWLGGTKDKIPIWTHPYLMTREWDEKNSKWSNRSKPLKMHPGVEVHPAGTSQICHQCKRNPIGALWNVADTVVLDDQGQLDLDDGTIRLNSGYIDTTEIKRARRKKIRLPENKPLTGSHKTSHVRAVARRNLRQPPKSTRAKDTTQSRYTCLYVDCGHECHADENAAINIGRKYLQERIHIEASRQALSTR

SEQ ID NO: 834 - protein, 1269 aa, unknown
  Synthetic Sequence
MVAGLKKIKRDGVTMKSNYHGGVKARAWRKRIGGLARRQKETVFTYKFPLETEEAGIDFDKAVQTYGIAEGISQGSLIGLVCAFHLSGFRLFSKADETKAFCNQGRYPNQAFAEKLRNELSVTLPKLSPQSLDVLFQSSPKSKNGVAPEWSKNAIRNRLYTNWTGKGAGTNPDEHLLEIAEDIAAEIDSDLDGWKDLEEHPEKGLSAADRYFQAQGDFPSLTGLPPSVPLTPQNSTVAFEGDPVCLNPSDNTLLHQAVARCAGRILQEQPNLSPDKNRFINQLQDELVSSQNNGLSWLFGVGFKYWKEMSVDQLADDYKVKSTDLDALKQVKSFIDAIPLNPLFDTPHYGEFRASVAGKMRSWVKNYWKRLLDLKSQLGTANINLPEGLDEQRAENLFSGLLIDSKGLRQVTDKLPSRLKKAEDTIDRLMGDGNPTSDDIEQVETVAAEISAFIGQVEQFNNQLEQRLENPLEGDDETFLKQLKIDLPAEFKKPPAINRISGGSPDPTAEIAELEEKLDRLMSARKEHYETIAEWASANKVTLDPMEAMTTLEAQRLTERGAEGDQEEFALRLLLQRIGRLANRLSPQGATAIRDLLRPVFTEKREFNLFFHNRMGSLYRSPYSTSRHQPFTIDVAVAKNTDWMDALDGIAETIMKGLSQAGDELSLRLRDWINISGFSLSQRLRGLPDTVPGELALVRSADDVRIPPMLALQLEEDEVSREVCLKAFNLYVSAINGCLFRALREGFIVRTKFQRLERDVLSYVPKTKLWNYPQRLDTARGPIHSALAAAWINKEGSVIDPVETVTALSDTGFSDDGIPEYLVQAPHDWYTPIDLRDISKPVSGLPVKKNITGLKRQKKQTAFRMVGPSSFKSHLDSTLLSEEVKLGDFTLIFDQYYKQRVSYNGRVKITFEPDRLHVEAAVPVIDKRVRPSTEEDALFDHLLAIDLGEKRVGYAVYDIKACLRTGDIKPLEDGDGKPIVGSVAVPSIRRLMKAVRSHRQQRQPNQKVNQTYSTALMNYRENVIGDVCNRIDTLMEKYNAFPVLESSVMNFEAGSRQLEMVYGSVLHRYTYSKIDAHTAKRKEYWYTGEYWDHPYLMAHKWNERTRSYSGSLSALTLYPGVMVHPAGTSQRCHQCKRNPMVEIKQLTGQVEINADGSLELDDGTICLYEGYDYSPEEYKKAKREKRRLDPNVPLSGRHQAKHVSAVAKRNLRRPTVSMMSGDTTQARYVCLYTDCDFTGHADENAAINIGWKYLTERIALSESKDKAGV

SEQ ID NO: 835 - protein, 1340 aa, unknown
  Synthetic Sequence
MQISKVNHKHVAVGQKDRERITGFIYNDPVGDEKSLEDVVAKRANDTKVLFNVFNTKDLYDSQESDKSEKDKEIISKGAKFVAKSFNSAITILKKQNKIYSTLTSQQVIKELKDKFGGARIYDDDIEEALTETLKKSFRKENVRNSIKVLIENAAGIRSSLSKDEEELIQEYFVKQLVEEYTKTKLQKNVVKSIKNQNMVIQPDSDSQVLSLSESRREKQSSAVSSDTLVNCKEKDVLKAFLTDYAVLDEDERNSLLWKLRNLVNLYFYGSESIRDYSYTKEKSVWKEHDEQKANKTLFIDEICHITKIGKNGKEQKVLDYEENRSRCRKQNINYYRSALNYAKNNTSGIFENEDSNHFWIHLIENEVERLYNGIENGEEFKFETGYISEKVWKAVINHLSIKYIALGKAVYNYAMKELSSPGDIEPGKIDDSYINGITSFDYEIIKAEESLQRDISMNVVFATNYLACATVDTDKDFLLFSKEDIRSCTKKDGNLCKNIMQFWGGYSTWKNFCEEYLKDDKDALELLYSLKSMLYSMRNSSFHFSTENVDNGSWDTELIGKLFEEDCNRAARIEKEKFYNNNLHMFYSSSLLEKVLERLYSSHHERASQVPSFNRVFVRKNFPSSLSEQRITPKFTDSKDEQIWQSAVYYLCKEIYYNDFLQSKEAYKLFREGVKNLDKNDINNQKAADSFKQAVVYYGKAIGNATLSQVCQAIMTEYNRQNNDGLKKKSAYAEKQNSNKYKHYPLFLKQVLQSAFWEYLDENKEIYGFISAQIHKSNVEIKAEDFIANYSSQQYKKLVDKVKKTPELQKWYTLGRLINPRQANQFLGSIRNYVQFVKDIQRRAKENGNPIRNYYEVLESDSIIKILEMCTKLNGTTSNDIHDYFRDEDEYAEYISQFVNFGDVHSGAALNAFCNSESEGKKNGIYYDGINPIVNRNWVLCKLYGSPDLISKIISRVNENMIHDFHKQEDLIREYQIKGICSNKKEQQDLRTFQVLKNRVELRDIVEYSEIINELYGQLIKWCYLRERDLMYFQLGFHYLCLNNASSKEADYIKINVDDRNISGAILYQIAAMYINGLPVYYKKDDMYVALKSGKKASDELNSNEQTSKKINYFLKYGNNILGDKKDQLYLAGLELFENVAEHENIIIFRNEIDHFHYFYDRDRSMLDLYSEVFDRFFTYDMKLRKNVVNMLYNILLDHNIVSSFVFETGEKKVGRGDSEVIKPSAKIRLRANNGVSSDVFTYKVGSKDELKIATLPAKNEEFLLNVARLIYYPDMEAVSENMVREGVVKVEKSNDKKGKISRGSNTRSSNQSKYNNKSKNRMNYSMGSIFEKMDLKFD

SEQ ID NO: 836 - protein, 1437 aa, unknown
  Synthetic Sequence
MKISKVREENRGAKLTVNAKTAVVSENRSQEGILYNDPSRYGKSRKNDEDRDRYIESRLKSSGKLYRIFNEDKNKRETDELQWFLSEIVKKINRRNGLVLSDMLSVDDRAFEKAFEKYAELSYTNRRNKVSGSPAFETCGVDAATAERLKGIISETNFINRIKNNIDNKVSEDIIDRIIAKYLKKSLCRERVKRGLKKLLMNAFDLPYSDPDIDVQRDFIDYVLEDFYHVRAKSQVSRSIKNMNMPVQPEGDGKFAITVSKGGTESGNKRSAEKEAFKKFLSDYASLDERVRDDMLRRMRRLVVLYFYGSDDSKLSDVNEKFDVWEDHAARRVDNREFIKLPLENKLANGKTDKDAERIRKNTVKELYRNQNIGCYRQAVKAVEEDNNGRYFDDKMLNMFFIHRIEYGVEKIYANLKQVTEFKARTGYLSEKIWKDLINYISIKYIAMGKAVYNYAMDELNASDKKEIELGKISEEYLSGISSFDYELIKAEEMLQRETAVYVAFAARHLSSQTVELDSENSDFLLLKPKGTMDKNDKNKLASNNILNFLKDKETLRDTILQYFGGHSLWTDFPFDKYLAGGKDDVDFLTDLKDVIYSMRNDSFHYATENHNNGKWNKELISAMFEHETERMTVVMKDKFYSNNLPMFYKNDDLKKLLIDLYKDNVERASQVPSFNKVFVRKNFPALVRDKDNLGIELDLKADADKGENELKFYNALYYMFKEIYYNAFLNDKNVRERFITKATKVADNYDRNKERNLKDRIKSAGSDEKKKLREQLQNYIAENDFGQRIKNIVQVNPDYTLAQICQLIMTEYNQQNNGCMQKKSAARKDINKDSYQHYKMLLLVNLRKAFLEFIKENYAFVLKPYKHDLCDKADFVPDFAKYVKPYAGLISRVAGSSELQKWYIVSRFLSPAQANHMLGFLHSYKQYVWDIYRRASETGTEINHSIAEDKIAGVDITDVDAVIDLSVKLCGTISSEISDYFKDDEVYAEYISSYLDFEYDGGNYKDSLNRFCNSDAVNDQKVALYYDGEHPKLNRNIILSKLYGERRFLEKITDRVSRSDIVEYYKLKKETSQYQTKGIFDSEDEQKNIKKFQEMKNIVEFRDLMDYSEIADELQGQLINWIYLRERDLMNFQLGYHYACLNNDSNKQATYVTLDYQGKKNRKINGAILYQICAMYINGLPLYYVDKDSSEWTVSDGKESTGAKIGEFYRYAKSFENTSDCYASGLEIFENISEHDNITELRNYIEHFRYYSSFDRSFLGIYSEVFDRFFTYDLKYRKNVPTILYNILLQHFVNVRFEFVSGKKMIGIDKKDRKIAKEKECARITIREKNGVYSEQFTYKLKNGTVYVDARDKRYLQSIIRLLFYPEKVNMDEMIEVKEKKKPSDNNTGKGYSKRDRQQDRKEYDKYKEKKKKEGNFLSGMGGNINWDEINAQLKN

SEQ ID NO: 837 - protein, 1385 aa, Clostridium aminophilum
MKFSKVDHTRSAVGIQKATDSVHGMLYTDPKKQEVNDLDKRFDQLNVKAKRLYNVFNQSKAEEDDDEKRFGKVVKKLNRELKDLLFHREVSRYNSIGNAKYNYYGIKSNPEEIVSNLGMVESLKGERDPQKVISKLLLYYLRKGLKPGTDGLRMILEASCGLRKLSGDEKELKVFLQTLDEDFEKKTFKKNLIRSIENQNMAVQPSNEGDPIIGITQGRFNSQKNEEKSAIERMMSMYADLNEDHREDVLRKLRRLNVLYFNVDTEKTEEPTLPGEVDTNPVFEVWHDHEKGKENDRQFATFAKILTEDRETRKKEKLAVKEALNDLKSAIRDHNIMAYRCSIKVTEQDKDGLFFEDQRINRFWIHHIESAVERILASINPEKLYKLRIGYLGEKVWKDLLNYLSIKYIAVGKAVFHFAMEDLGKTGQDIELGKLSNSVSGGLTSFDYEQIRADETLQRQLSVEVAFAANNLFRAVVGQTGKKIEQSKSEENEEDFLLWKAEKIAESIKKEGEGNTLKSILQFFGGASSWDLNHFCAAYGNESSALGYETKFADDLRKAIYSLRNETFHFTTLNKGSFDWNAKLIGDMFSHEAATGIAVERTRFYSNNLPMFYRESDLKRIMDHLYNTYHPRASQVPSFNSVFVRKNFRLFLSNTLNTNTSFDTEVYQKWESGVYYLFKEIYYNSFLPSGDAHHLFFEGLRRIRKEADNLPIVGKEAKKRNAVQDFGRRCDELKNLSLSAICQMIMTEYNEQNNGNRKVKSTREDKRKPDIFQHYKMLLLRTLQEAFAIYIRREEFKFIFDLPKTLYVMKPVEEFLPNWKSGMFDSLVERVKQSPDLQRWYVLCKFLNGRLLNQLSGVIRSYIQFAGDIQRRAKANHNRLYMDNTQRVEYYSNVLEVVDFCIKGTSRFSNVFSDYFRDEDAYADYLDNYLQFKDEKIAEVSSFAALKTFCNEEEVKAGIYMDGENPVMQRNIVMAKLFGPDEVLKNVVPKVTREEIEEYYQLEKQIAPYRQNGYCKSEEDQKKLLRFQRIKNRVEFQTITEFSEIINELLGQLISWSFLRERDLLYFQLGFHYLCLHNDTEKPAEYKEISREDGTVIRNAILHQVAAMYVGGLPVYTLADKKLAAFEKGEADCKLSISKDTAGAGKKIKDFFRYSKYVLIKDRMLTDQNQKYTIYLAGLELFENTDEHDNITDVRKYVDHFKYYATSDENAMSILDLYSEIHDRFFTYDMKYQKNVANMLENILLRHFVLIRPEFFTGSKKVGEGKKITCKARAQIEIAENGMRSEDFTYKLSDGKKNISTCMIAARDQKYLNTVARLLYYPHEAKKSIVDTREKKNNKKTNRGDGTFNKQKGTARKEKDNGPREFNDTGFSNTPFAGFDPFRNS

SEQ ID NO: 838 - protein, 1334 aa, unknown
  Synthetic Sequence
MKISKVDHTRMAVAKGNQHRRDEISGILYKDPTKTGSIDFDERFKKLNCSAKILYHVFNGIAEGSNKYKNIVDKVNNNLDRVLFTGKSYDRKSIIDIDTVLRNVEKINAFDRISTEEREQIIDDLLEIQLRKGLRKGKAGLREVLLIGAGVIVRTDKKQEIADFLEILDEDFNKTNQAKNIKLSIENQGLVVSPVSRGEERIFDVSGAQKGKSSKKAQEKEALSAFLLDYADLDKNVRFEYLRKIRRLINLYFYVKNDDVMSLTEIPAEVNLEKDFDIWRDHEQRKEENGDFVGCPDILLADRDVKKSNSKQVKIAERQLRESIREKNIKRYRFSIKTIEKDDGTYFFANKQISVFWIHRIENAVERILGSINDKKLYRLRLGYLGEKVWKDILNFLSIKYIAVGKAVFNFAMDDLQEKDRDIEPGKISENAVNGLTSFDYEQIKADEMLQREVAVNVAFAANNLARVTVDIPQNGEKEDILLWNKSDIKKYKKNSKKGILKSILQFFGGASTWNMKMFEIAYHDQPGDYEENYLYDIIQIIYSLRNKSFHFKTYDHGDKNWNRELIGKMIEHDAERVISVEREKFHSNNLPMFYKDADLKKILDLLYSDYAGRASQVPAFNTVLVRKNFPEFLRKDMGYKVHFNNPEVENQWHSAVYYLYKEIYYNLFLRDKEVKNLFYTSLKNIRSEVSDKKQKLASDDFASRCEEIEDRSLPEICQIIMTEYNAQNFGNRKVKSQRVIEKNKDIFRHYKMLLIKTLAGAFSLYLKQERFAFIGKATPIPYETTDVKNFLPEWKSGMYASFVEEIKNNLDLQEWYIVGRFLNGRMLNQLAGSLRSYIQYAEDIERRAAENRNKLFSKPDEKIEACKKAVRVLDLCIKISTRISAEFTDYFDSEDDYADYLEKYLKYQDDAIKELSGSSYAALDHFCNKDDLKFDIYVNAGQKPILQRNIVMAKLFGPDNILSEVMEKVTESAIREYYDYLKKVSGYRVRGKCSTEKEQEDLLKFQRLKNAVEFRDVTEYAEVINELLGQLISWSYLRERDLLYFQLGFHYMCLKNKSFKPAEYVDIRRNNGTIIHNAILYQIVSMYINGLDFYSCDKEGKTLKPIETGKGVGSKIGQFIKYSQYLYNDPSYKLEIYNAGLEVFENIDEHDNITDLRKYVDHFKYYAYGNKMSLLDLYSEFFDRFFTYDMKYQKNVVNVLENILLRHFVIFYPKFGSGKKDVGIRDCKKERAQIEISEQSLTSEDFMFKLDDKAGEEAKKFPARDERYLQTIAKLLYYPNEIEDMNRFMKKGETINKKVQFNRKKKITRKQKNNSSNEVLSSTMGYLFKNIKL

SEQ ID NO: 839 - protein, 1175 aa, Carnobacterium gallinarum
MRITKVKIKLDNKLYQVTMQKEEKYGTLKLNEESRKSTAEILRLKKASFNKSFHSKTINSQKENKNATIKKNGDYISQIFEKLVGVDTNKNIRKPKMSLTDLKDLPKKDLALFIKRKFKNDDIVEIKNLDLISLFYNALQKVPGEHFTDESWADFCQEMMPYREYKNKFIERKIILLANSIEQNKGFSINPETFSKRKRVLHQWAIEVQERGDFSILDEKLSKLAEIYNFKKMCKRVQDELNDLEKSMKKGKNPEKEKEAYKKQKNFKIKTIWKDYPYKTHIGLIEKIKENEELNQFNIEIGKYFEHYFPIKKERCTEDEPYYLNSETIATTVNYQLKNALISYLMQIGKYKQFGLENQVLDSKKLQEIGIYEGFQTKFMDACVFATSSLKNIIEPMRSGDILGKREFKEAIATSSFVNYHHFFPYFPFELKGMKDRESELIPFGEQTEAKQMQNIWALRGSVQQIRNEIFHSFDKNQKFNLPQLDKSNFEFDASENSTGKSQSYIETDYKFLFEAEKNQLEQFFIERIKSSGALEYYPLKSLEKLFAKKEMKFSLGSQVVAFAPSYKKLVKKGHSYQTATEGTANYLGLSYYNRYELKEESFQAQYYLLKLIYQYVFLPNFSQGNSPAFRETVKAILRINKDEARKKMKKNKKFLRKYAFEQVREMEFKETPDQYMSYLQSEMREEKVRKAEKNDKGFEKNITMNFEKLLMQIFVKGFDVFLTTFAGKELLLSSEEKVIKETEISLSKKINEREKTLKASIQVEHQLVATNSAISYWLFCKLLDSRHLNELRNEMIKFKQSRIKFNHTQHAELIQNLLPIVELTILSNDYDEKNDSQNVDVSAYFEDKSLYETAPYVQTDDRTRVSFRPILKLEKYHTKSLIEALLKDNPQFRVAATDIQEWMHKREEIGELVEKRKNLHTEWAEGQQTLGAEKREEYRDYCKKIDRFNWKANKVTLTYLSQLHYLITDLLGRMVGFSALFERDLVYFSRSFSELGGETYHISDYKNLSGVLRLNAEVKPIKIKNIKVIDNEENPYKGNEPEVKPFLDRLHAYLENVIGIKAVHGKIRNQTAHLSVLQLELSMIESMNNLRDLMAYDRKLKNAVTKSMIKILDKHGMILKLKIDENHKNFEIESLIPKEIIHLKDKAIKTNQVSEEYCQLVLALLTTNPGNQLN

SEQ ID NO: 840 - protein, 1154 aa, Paludibacter propionicigenes
MRVSKVKVKDGGKDKMVLVHRKTTGAQLVYSGQPVSNETSNILPEKKRQSFDLSTLNKTIIKFDTAKKQKLNVDQYKIVEKIFKYPKQELPKQIKAEEILPFLNHKFQEPVKYWKNGKEESFNLTLLIVEAVQAQDKRKLQPYYDWKTWYIQTKSDLLKKSIENNRIDLTENLSKRKKALLAWETEFTASGSIDLTHYHKVYMTDVLCKMLQDVKPLTDDKGKINTNAYHRGLKKALQNHQPAIFGTREVPNEANRADNQLSIYHLEVVKYLEHYFPIKTSKRRNTADDIAHYLKAQTLKTTIEKQLVNAIRANIIQQGKTNHHELKADTTSNDLIRIKTNEAFVLNLTGTCAFAANNIRNMVDNEQTNDILGKGDFIKSLLKDNTNSQLYSFFFGEGLSTNKAEKETQLWGIRGAVQQIRNNVNHYKKDALKTVFNISNFENPTITDPKQQTNYADTIYKARFINELEKIPEAFAQQLKTGGAVSYYTIENLKSLLTTFQFSLCRSTIPFAPGFKKVFNGGINYQNAKQDESFYELMLEQYLRKENFAEESYNARYFMLKLIYNNLFLPGFTTDRKAFADSVGFVQMQNKKQAEKVNPRKKEAYAFEAVRPMTAADSIADYMAYVQSELMQEQNKKEEKVAEETRINFEKFVLQVFIKGFDSFLRAKEFDFVQMPQPQLTATASNQQKADKLNQLEASITADCKLTPQYAKADDATHIAFYVFCKLLDAAHLSNLRNELIKFRESVNEFKFHHLLEIIEICLLSADVVPTDYRDLYSSEADCLARLRPFIEQGADITNWSDLFVQSDKHSPVIHANIELSVKYGTTKLLEQIINKDTQFKTTEANFTAWNTAQKSIEQLIKQREDHHEQWVKAKNADDKEKQERKREKSNFAQKFIEKHGDDYLDICDYINTYNWLDNKMHFVHLNRLHGLTIELLGRMAGFVALFDRDFQFFDEQQIADEFKLHGFVNLHSIDKKLNEVPTKKIKEIYDIRNKIIQINGNKINESVRANLIQFISSKRNYYNNAFLHVSNDEIKEKQMYDIRNHIAHFNYLTKDAADFSLIDLINELRELLHYDRKLKNAVSKAFIDLFDKHGMILKLKLNADHKLKVESLEPKKIYHLGSSAKDKPEYQYCTNQVMMAYCNMCRSLLEMKK

SEQ ID NO: 841 - protein, 1120 aa, Listeria seeligeri
MWISIKTLIHHLGVLFFCDYMYNRREKKIIEVKTMRITKVEVDRKKVLISRDKNGGKLVYENEMQDNTEQIMHHKKSSFYKSVVNKTICRPEQKQMKKLVHGLLQENSQEKIKVSDVTKLNISNFLNHRFKKSLYYFPENSPDKSEEYRIEINLSQLLEDSLKKQQGTFICWESFSKDMELYINWAENYISSKTKLIKKSIRNNRIQSTESRSGQLMDRYMKDILNKNKPFDIQSVSEKYQLEKLTSALKATFKEAKKNDKEINYKLKSTLQNHERQIIEELKENSELNQFNIEIRKHLETYFPIKKTNRKVGDIRNLEIGEIQKIVNHRLKNKIVQRILQEGKLASYEIESTVNSNSLQKIKIEEAFALKFINACLFASNNLRNMVYPVCKKDILMIGEFKNSFKEIKHKKFIRQWSQFFSQEITVDDIELASWGLRGAIAPIRNEIIHLKKHSWKKFFNNPTFKVKKSKIINGKTKDVTSEFLYKETLFKDYFYSELDSVPELIINKMESSKILDYYSSDQLNQVFTIPNFELSLLTSAVPFAPSFKRVYLKGFDYQNQDEAQPDYNLKLNIYNEKAFNSEAFQAQYSLFKMVYYQVFLPQFTTNNDLFKSSVDFILTLNKERKGYAKAFQDIRKMNKDEKPSEYMSYIQSQLMLYQKKQEEKEKINHFEKFINQVFIKGFNSFIEKNRLTYICHPTKNTVPENDNIEIPFHTDMDDSNIAFWLMCKLLDAKQLSELRNEMIKFSCSLQSTEEISTFTKAREVIGLALLNGEKGCNDWKELFDDKEAWKKNMSLYVSEELLQSLPYTQEDGQTPVINRSIDLVKKYGTETILEKLFSSSDDYKVSAKDIAKLHEYDVTEKIAQQESLHKQWIEKPGLARDSAWTKKYQNVINDISNYQWAKTKVELTQVRHLHQLTIDLLSRLAGYMSIADRDFQFSSNYILERENSEYRVTSWILLSENKNKNKYNDYELYNLKNASIKVSSKNDPQLKVDLKQLRLTLEYLELFDNRLKEKRNNISHFNYLNGQLGNSILELFDDARDVLSYDRKLKNAVSKSLKEILSSHGMEVTFKPLYQTNHHLKIDKLQPKKIHHLGEKSTVSSNQVSNEYCQLVRTLLTMK

SEQ ID NO: 842 - protein, 1051 aa, Listeria newyorkensis
MKITKMRVDGRTIVMERTSKEGQLGYEGIDGNKTTEIIFDKKKESFYKSILNKTVRKPDEKEKNRRKQAINKAINKEITELMLAVLHQEVPSQKLHNLKSLNTESLTKLFKPKFQNMISYPPSKGAEHVQFCLTDIAVPAIRDLDEIKPDWGIFFEKLKPYTDWAESYIHYKQTTIQKSIEQNKIQSPDSPRKLVLQKYVTAFLNGEPLGLDLVAKKYKLADLAESFKLVDLNEDKSANYKIKACLQQHQRNILDELKEDPELNQYGIEVKKYIQRYFPIKRAPNRSKHARADFLKKELIESTVEQQFKNAVYHYVLEQGKMEAYELTDPKTKDLQDIRSGEAFSFKFINACAFASNNLKMILNPECEKDILGKGNFKKNLPNSTTRSDVVKKMIPFFSDELQNVNFDEAIWAIRGSIQQIRNEVYHCKKHSWKSILKIKGFEFEPNNMKYADSDMQKLMDKDIAKIPEFIEEKLKSSGVVRFYRHDELQSIWEMKQGFSLLTTNAPFVPSFKRVYAKGHDYQTSKNRYYNLDLTTFDILEYGEEDFRARYFLTKLVYYQQFMPWFTADNNAFRDAANFVLRLNKNRQQDAKAFINIREVEEGEMPRDYMGYVQGQIAIHEDSIEDTPNHFEKFISQVFIKGFDRHMRSANLKFIKNPRNQGLEQSEIEEMSFDIKVEPSFLKNKDDYIAFWIFCKMLDARHLSELRNEMIKYDGHLTGEQEIIGLALLGVDSRENDWKQFFSSEREYEKIMKGYVVEELYQREPYRQSDGKTPILFRGVEQARKYGTETVIQRLFDANPEFKVSKCNLAEWERQKETIEETIKRRKELHNEWAKNPKKPQNNAFFKEYKECCDAIDAYNWHKNKTTLAYVNELHHLLIEILGRYVGYVAIADRDFQCMANQYFKHSGITERVEYWGDNRLKSIKKLDTFLKKEGLFVSEKNARNHIAHLNYLSLKSECTLLYLSERLREIFKYDRKLKNAVSKSLIDILDRHGMSVVFANLKENKHRLVIKSLEPKKLRHLGGKKIDGGYIETNQVSEEYCGIVKRLLEM

SEQ ID NO: 843 - protein, 1182 aa, Leptotrichia wadei
MYMKITKIDGVSHYKKQDKGILKKKWKDLDERKQREKIEARYNKQIESKIYKEFFRLKNKKRIEKEEDQNIKSLYFFIKELYLNEKNEEWELKNINLEILDDKERVIKGYKFKEDVYFFKEGYKEYYLRILFNNLIEKVQNENREKVRKNKEFLDLKEIFKKYKNRKIDLLLKSINNNKINLEYKKENVNEEIYGINPTNDREMTFYELLKEIIEKKDEQKSILEEKLDNFDITNFLENIEKIFNEETEINIIKGKVLNELREYIKEKEENNSDNKLKQIYNLELKKYIENNFSYKKQKSKSKNGKNDYLYLNFLKKIMFIEEVDEKKEINKEKFKNKINSNFKNLFVQHILDYGKLLYYKENDEYIKNTGQLETKDLEYIKTKETLIRKMAVLVSFAANSYYNLFGRVSGDILGTEVVKSSKTNVIKVGSHIFKEKMLNYFFDFEIFDANKIVEILESISYSIYNVRNGVGHFNKLILGKYKKKDINTNKRIEEDLNNNEEIKGYFIKKRGEIERKVKEKFLSNNLQYYYSKEKIENYFEVYEFEILKRKIPFAPNFKRIIKKGEDLFNNKNNKKYEYFKNFDKNSAEEKKEFLKTRNFLLKELYYNNFYKEFLSKKEEFEKIVLEVKEEKKSRGNINNKKSGVSFQSIDDYDTKINISDYIASIHKKEMERVEKYNEEKQKDTAKYIRDFVEEIFLTGFINYLEKDKRLHFLKEEFSILCNNNNNVVDFNININEEKIKEFLKENDSKTLNLYLFFNMIDSKRISEFRNELVKYKQFTKKRLDEEKEFLGIKIELYETLIEFVILTREKLDTKKSEEIDAWLVDKLYVKDSNEYKEYEEILKLFVDEKILSSKEAPYYATDNKTPILLSNFEKTRKYGTQSFLSEIQSNYKYSKVEKENIEDYNKKEEIEQKKKSNIEKLQDLKVELHKKWEQNKITEKEIEKYNNTTRKINEYNYLKNKEELQNVYLLHEMLSDLLARNVAFFNKWERDFKFIVIAIKQFLRENDKEKVNEFLNPPDNSKGKKVYFSVSKYKNTVENIDGIHKNFMNLIFLNNKFMNRKIDKMNCAIWVYFRNYIAHFLHLHTKNEKISLISQMNLLIKLFSYDKKVQNHILKSTKTLLEKYNIQINFEISNDKNEVFKYKIKNRLYSKKGKMLGKNNKFEILENEFLENVKAMLEYSE

SEQ ID NO: 844 - protein, 1285 aa, Rhodobacter capsulatus
MQIGKVQGRTISEFGDPAGGLKRKISTDGKNRKELPAHLSSDPKALIGQWISGIDKIYRKPDSRKSDGKAIHSPTPSKMQFDARDDLGEAFWKLVSEAGLAQDSDYDQFKRRLHPYGDKFQPADSGAKLKFEADPPEPQAFHGRWYGAMSKRGNDAKELAAALYEHLHVDEKRIDGQPKRNPKTDKFAPGLVVARALGIESSVLPRGMARLARNWGEEEIQTYFVVDVAASVKEVAKAAVSAAQAFDPPRQVSGRSLSPKVGFALAEHLERVTGSKRCSFDPAAGPSVLALHDEVKKTYKRLCARGKNAARAFPADKTELLALMRHTHENRVRNQMVRMGRVSEYRGQQAGDLAQSHYWTSAGQTEIKESEIFVRLWVGAFALAGRSMKAWIDPMGKIVNTEKNDRDLTAAVNIRQVISNKEMVAEAMARRGIYFGETPELDRLGAEGNEGFVFALLRYLRGCRNQTFHLGARAGFLKEIRKELEKTRWGKAKEAEHVVLTDKTVAAIRAIIDNDAKALGARLLADLSGAFVAHYASKEHFSTLYSEIVKAVKDAPEVSSGLPRLKLLLKRADGVRGYVHGLRDTRKHAFATKLPPPPAPRELDDPATKARYIALLRLYDGPFRAYASGITGTALAGPAARAKEAATALAQSVNVTKAYSDVMEGRSSRLRPPNDGETLREYLSALTGETATEFRVQIGYESDSENARKQAEFIENYRRDMLAFMFEDYIRAKGFDWILKIEPGATAMTRAPVLPEPIDTRGQYEHWQAALYLVMHFVPASDVSNLLHQLRKWEALQGKYELVQDGDATDQADARREALDLVKRFRDVLVLFLKTGEARFEGRAAPFDLKPFRALFANPATFDRLFMATPTTARPAEDDPEGDGASEPELRVARTLRGLRQIARYNHMAVLSDLFAKHKVRDEEVARLAEIEDETQEKSQIVAAQELRTDLHDKVMKCHPKTISPEERQSYAAAIKTIEEHRFLVGRVYLGDHLRLHRLMMDVIGRLIDYAGAYERDTGTFLINASKQLGAGADWAVTIAGAANTDARTQTRKDLAHFNVLDRADGTPDLTALVNRAREMMAYDRKRKNAVPRSILDMLARLGLTLKWQMKDHLLQDATITQAAIKHLDKVRLTVGGPAAVTEARFSQDYLQMVAAVFNGSVQNPKPRRRDDGDAWHKPPKPATAQSQPDQKPPNKAPSAGSRLPPPQVGEVYEGVVVKVIDTGSLGFLAVEGVAGNIGLHISRLRRIREDAIIVGRRYRFRVEIYVPPKSNTSKLNAADLVRID

SEQ ID NO: 845 - protein, 1159 aa, Leptotrichia buccalis
MKVTKVGGISHKKYTSEGRLVKSESEENRTDERLSALLNMRLDMYIKNPSSTETKENQKRIGKLKKFFSNKMVYLKDNTLSLKNGKKENIDREYSETDILESDVRDKKNFAVLKKIYLNENVNSEELEVFRNDIKKKLNKINSLKYSFEKNKANYQKINENNIEKVEGKSKRNIIYDYYRESAKRDAYVSNVKEAFDKLYKEEDIAKLVLEIENLTKLEKYKIREFYHEIIGRKNDKENFAKIIYEEIQNVNNMKELIEKVPDMSELKKSQVFYKYYLDKEELNDKNIKYAFCHFVEIEMSQLLKNYVYKRLSNISNDKIKRIFEYQNLKKLIENKLLNKLDTYVRNCGKYNYYLQDGEIATSDFIARNRQNEAFLRNIIGVSSVAYFSLRNILETENENDITGRMRGKTVKNNKGEEKYVSGEVDKIYNENKKNEVKENLKMFYSYDFNMDNKNEIEDFFANIDEAISSIRHGIVHFNLELEGKDIFAFKNIAPSEISKKMFQNEINEKKLKLKIFRQLNSANVFRYLEKYKILNYLKRTRFEFVNKNIPFVPSFTKLYSRIDDLKNSLGIYWKTPKTNDDNKTKEIIDAQIYLLKNIYYGEFLNYFMSNNGNFFEISKEIIELNKNDKRNLKTGFYKLQKFEDIQEKIPKEYLANIQSLYMINAGNQDEEEKDTYIDFIQKIFLKGFMTYLANNGRLSLIYIGSDEETNTSLAEKKQEFDKFLKKYEQNNNIKIPYEINEFLREIKLGNILKYTERLNMFYLILKLLNHKELTNLKGSLEKYQSANKEEAFSDQLELINLLNLDNNRVTEDFELEADEIGKFLDFNGNKVKDNKELKKFDTNKIYFDGENIIKHRAFYNIKKYGMLNLLEKIADKAGYKISIEELKKYSNKKNEIEKNHKMQENLHRKYARPRKDEKFTDEDYESYKQAIENIEEYTHLKNKVEFNELNLLQGLLLRILHRLVGYTSIWERDLRFRLKGEFPENQYIEEIFNFENKKNVKYKGGQIVEKYIKFYKELHQNDEVKINKYSSANIKVLKQEKKDLYIRNYIAHFNYIPHAEISLLEVLENLRKLLSYDRKLKNAVMKSVVDILKEYGFVATFKIGADKKIGIQTLESEKIVHLKNLKKKKLMTDRNSEELCKLVKIMFEYKMEEKKSEN

SEQ ID NO: 846 - protein, 1389 aa, Leptotrichia shahii
MGNLFGHKRWYEVRDKKDFKIKRKVKVKRNYDGNKYILNINENNNKEKIDNNKFIRKYINYKKNDNILKEFTRKFHAGNILFKLKGKEGIIRIENNDDFLETEEVVLYIEAYGKSEKLKALGITKKKIIDEAIRQGITKDDKKIEIKRQENEEEIEIDIRDEYTNKTLNDCSIILRIIENDELETKKSIYEIFKNINMSLYKIIEKIIENETEKVFENRYYEEHLREKLLKDDKIDVILTNFMEIREKIKSNLEILGFVKFYLNVGGDKKKSKNKKMLVEKILNINVDLTVEDIADFVIKELEFWNITKRIEKVKKVNNEFLEKRRNRTYIKSYVLLDKHEKFKIERENKKDKIVKFFVENIKNNSIKEKIEKILAEFKIDELIKKLEKELKKGNCDTEIFGIFKKHYKVNFDSKKFSKKSDEEKELYKIIYRYLKGRIEKILVNEQKVRLKKMEKIEIEKILNESILSEKILKRVKQYTLEHIMYLGKLRHNDIDMTTVNTDDFSRLHAKEELDLELITFFASTNMELNKIFSRENINNDENIDFFGGDREKNYVLDKKILNSKIKIIRDLDFIDNKNNITNNFIRKFTKIGTNERNRILHAISKERDLQGTQDDYNKVINIIQNLKISDEEVSKALNLDVVFKDKKNIITKINDIKISEENNNDIKYLPSFSKVLPEILNLYRNNPKNEPFDTIETEKIVLNALIYVNKELYKKLILEDDLEENESKNIFLQELKKTLGNIDEIDENIIENYYKNAQISASKGNNKAIKKYQKKVIECYIGYLRKNYEELFDFSDFKMNIQEIKKQIKDINDNKTYERITVKTSDKTIVINDDFEYIISIFALLNSNAVINKIRNRFFATSVWLNTSEYQNIIDILDEIMQLNTLRNECITENWNLNLEEFIQKMKEIEKDFDDFKIQTKKEIFNNYYEDIKNNILTEFKDDINGCDVLEKKLEKIVIFDDETKFEIDKKSNILQDEQRKLSNINKKDLKKKVDQYIKDKDQEIKSKILCRIIFNSDFLKKYKKEIDNLIEDMESENENKFQEIYYPKERKNELYIYKKNLFLNIGNPNFDKIYGLISNDIKMADAKFLFNIDGKNIRKNKISEIDAILKNLNDKLNGYSKEYKEKYIKKLKENDDFFAKNIQNKNYKSFEKDYNRVSEYKKIRDLVEFNYLNKIESYLIDINWKLAIQMARFERDMHYIVNGLRELGIIKLSGYNTGISRAYPKRNGSDGFYTTTAYYKFFDEESYKKFEKICYGFGIDLSENSEINKPENESIRNYISHFYIVRNPFADYSIAEQIDRVSNLLSYSTRYNNSTYASVFEVFKKDVNLDYDELKKKFKLIGNNDILERLMKPKKVSVLELESYNSDYIKNLIIELLTKIENTNDTL

SEQ ID NO: 847 - RNA, 86 nt, Artificial Sequence
  Synthetic Sequence
ggaaccauucaaaacagcauagcaaguuaaaauaaggcuaguccguuaucaacuugaaaaaguggcaccgagucggugcuuuuuuu

SEQ ID NO: 848 - RNA, 67 nt, Artificial Sequence
  Synthetic Sequence
uagcaaguuaaaauaaggcuaguccguuaucaacuugaaaaaguggcaccgagucggugcuuuuuuu

SEQ ID NO: 849 - RNA, 88 nt, Streptococcus pyogenes
guuggaaccauucaaaacagcauagcaaguuaaaauaaggcuaguccguuaucaacuugaaaaaguggcaccgagucggugcuuuuuu

SEQ ID NO: 850 - RNA, 93 nt, Listeria innocua
auauuguuaguauucaaaauaacauagcaaguuaaaauaaggcuuuguccguuaucaacuuuuaauuaaguagcgcuguuucggcgcuuuuuu

SEQ ID NO: 851 - RNA, 104 nt, Streptococcus mutans
uguuggaaucauucgaaacaacacagcaaguuaaaauaaggcagugauuuuuaauccaguccguacacaacuugaaaaagugcgcaccgauucggugcuuuuuu

SEQ ID NO: 852 - RNA, 95 nt, Streptococcus thermophilus
uugugguuugaaaccauucgaaacaacacagcgaguuaaaauaaggcuuaguccguacucaacuugaaaagguggcaccgauucgguguuuuuuu

SEQ ID NO: 853 - RNA, 118 nt, Streptococcus thermophilus
uaauaauaguguaagggacgccuuacacaguuacuuaaaucuugcagaagcuacaaagauaaggcuucaugccgaaaucaacacccugucauuuuauggcaggguguuuucguuauuu

SEQ ID NO: 854 - RNA, 112 nt, Neisseria meningitidis
cauauugucgcacugcgaaaugagaaccguugcuacaauaaggccgucugaaaagaugugccgcaacgcucugccccuuaaagcuucugcuuuaaggggcaucguuuauuuc

SEQ ID NO: 855 - RNA, 110 nt, Pasteurella multocida
gcauauuguugcacugcgaaaugagagacguugcuacaauaaggcuucugaaaagaaugaccguaacgcucugccccuugugauucuuaauugcaaggggcaucguuuuu

SEQ ID NO: 856 - RNA, 115 nt, Mycoplasma mobile
uauuauguauuucgaaauacagauguacaguuaagaauacauaagaaugauacaucacuaaaaaaaggcuuuaugccguaacuacuacuuauuuucaaaauaaguaguuuuuuuu

SEQ ID NO: 857 - RNA, 26 nt, Artificial Sequence
  Synthetic Sequence
uagcaaguuaaaauaaggcuaguccg

SEQ ID NO: 858 - RNA, 36 nt, Streptococcus pyogenes
uuguuggaaccauucaaaacagcauagcaaguuaaa

SEQ ID NO: 859 - RNA, 36 nt, Streptococcus mutans
guguuggaaucauucgaaacaacacagcaaguuaaa

SEQ ID NO: 860 - RNA, 36 nt, Streptococcus thermophilus
gguuugaaaccauucgaaacaacacagcgaguuaaa

SEQ ID NO: 861 - RNA, 36 nt, Streptococcus thermophilus
cuuacacaguuacuuaaaucuugcagaagcuacaaa

SEQ ID NO: 862 - RNA, 36 nt, Listeria innocua
auauuguuaguauucaaaauaacauagcaaguuaaa

SEQ ID NO: 863 - RNA, 34 nt, Listeria innocua
auuguuaguauucaaaauaacauagcaaguuaaa

SEQ ID NO: 864 - RNA, 36 nt, Treponema denticola
auuuaagauccaucuuaaauuacacaacgaguucaa

SEQ ID NO: 865 - RNA, 36 nt, Neisseria meningitidis
auugucgcacugcgaaaugagaaccguugcuacaau

SEQ ID NO: 866 - RNA, 38 nt, Neisseria meningitidis
auauugucgcacugcgaaaugagaaccguugcuacaau

SEQ ID NO: 867 - RNA, 36 nt, Streptococcus gordonii; identical to SEQ ID NO: 861

SEQ ID NO: 868 - RNA, 36 nt, Bifidobacterium bifidum
augaucaaggucauugaccugacaggcauaaauuga

SEQ ID NO: 869 - RNA, 36 nt, Lactobacillus salivarius
gguuuugaccucauugauuuaacauucugaguugaa

SEQ ID NO: 870 - RNA, 37 nt, Francisella tularensis
guuucaguuguuagauuauuugguauguacuuguguu

SEQ ID NO: 871 - RNA, 37 nt, Francisella tularensis
auuacagagcauuaauuauuugguacauuuauaauuu

SEQ ID NO: 872 - RNA, 37 nt, Legionella pneumophila
auuucaggguaucgaaauuuagaugauuucuaauuua

SEQ ID NO: 873 - RNA, 36 nt, Nitratifractor salsuginis
uguaacaggguaggguuuuuugaggggucuuaaaau

SEQ ID NO: 874 - RNA, 36 nt, Butyrivibrio fibrisolvens
aguuucuaaucacuuaauuuuuucggaccuacuaaa

SEQ ID NO: 875 - RNA, 36 nt, Streptobacillus moniliformis
gauucacauuauucaaguuuacuacagauucuguau

SEQ ID NO: 876 - RNA, 36 nt, Mycoplasma mobile
aguuaagaauacauaagaaugauacaucacuaaaaa

SEQ ID NO: 877 - RNA, 44 nt, Capnocytophaga ochracea
auugugaauugcuuucaaauugugcgacaaaaguagguauaaua

SEQ ID NO: 878 - RNA, 36 nt, Acidovorax ebreus
auugcagcaacggcucucaccccggauaaccacaau

SEQ ID NO: 879 - RNA, 36 nt, Wolinella succinogenes
auagccgcugccuacucagccauuuagcgcagcgac

SEQ ID NO: 880 - RNA, 37 nt, Wolinella succinogenes
uuuguuaaagcuggaugggauuauuauagaguguugc

SEQ ID NO: 881 - RNA, 37 nt, Wolinella succinogenes
uuucaaggcaucgaacggauuugcuauaaaguguugc

SEQ ID NO: 882 - RNA, 36 nt, Prevotella ruminicola
uuuugcacacguaagauuccuacaucuuaucacaau

SEQ ID NO: 883 - RNA, 48 nt, Fibrobacter succinogenes
auugugaauugcuuucagauuaugaaaauaauauaguuaaaauuuuug

SEQ ID NO: 884 - RNA, 36 nt, Campylobacter jejuni
auuuuauuucgauuuuaaucaacccuaaauuucaau

SEQ ID NO: 885 - RNA, 36 nt, Campylobacter jejuni
auuuuagucccuuuuuaaauuucuuaugagauuaua

SEQ ID NO: 886 - RNA, 25 nt, Campylobacter jejuni
aagaaauuuaaaaagggacuaaaau

SEQ ID NO: 887 - RNA, 36 nt, Pasteurella multocida
auuguagcaacgucucucauuucgcagugcaacaau

SEQ ID NO: 888 - RNA, 36 nt, Rhodopseudomonas palustris
gccguggcuuuccuaccgauuucccaccgcaugauu

SEQ ID NO: 889 - RNA, 36 nt, Olsenella uli
ucugaauuaccagucagaacgauacugcgagucaaa

SEQ ID NO: 890 - RNA, 36 nt, Rhodospirillum rubrum
guuccauggccccgucccacacgccaugauagagcg

SEQ ID NO: 891 - RNA, 36 nt, Rhodospirillum rubrum
aaacgggagaaccgucccacacggccaugguagagu

SEQ ID NO: 892 - RNA, 36 nt, Dinoroseobacter shibae
uuaacggcucgaccgcgaauucugaacguaaagaca

SEQ ID NO: 893 - RNA, 36 nt, Verminephrobacter eiseniae
uuagcguccagagcgcauaucccagugagauauccg

SEQ ID NO: 894 - RNA, 75 nt, Streptococcus pyogenes
aaacagcauagcaaguuaaaauaaggcuaguccguuaucaacuugaaaaaguggcaccgagucggugcuuuuuuu

SEQ ID NO: 895 - RNA, 77 nt, Listeria innocua
aaauaacauagcaaguuaaaauaaggcuuuguccguuaucaacuuuuaauuaaguagcgcuguuucggcgcuuuuuu

SEQ ID NO: 896 - RNA, 73 nt, Artificial Sequence
  Synthetic Sequence
aacagcauagcaaguuaaaauaaggcuaguccguuaucaacuugaaaaaguggcaccgagucggugcuuuuuu

SEQ ID NO: 897 - RNA, 33 nt, Francisella novicida
uauaaauguaccaaauaauuaaugcucuguaau

SEQ ID NO: 898 - RNA, 74 nt, Campylobacter jejuni
aagaaauuuaaaaagggacuaaaauaaagaguuugcgggacucugcgggguuacaauccccuaaaaccgcuuuu

SEQ ID NO: 899 - RNA, 96 nt, Francisella novicida
aucuaaaauuauaaauguaccaaauaauuaaugcucuguaaucauuuaaaaguauuuugaacggaccucuguuugacacgucugaauaacuaaaaa

SEQ ID NO: 900 - RNA, 109 nt, Streptococcus thermophilus2
uguaagggacgccuuacacaguuacuuaaaucuugcagaagcuacaaagauaaggcuucaugccgaaaucaacacccugucauuuuauggcaggguguuuucguuauuu

SEQ ID NO: 901 - RNA, 110 nt, Mycoplasma mobile
uguauuucgaaauacagauguacaguuaagaauacauaagaaugauacaucacuaaaaaaaggcuuuaugccguaacuacuacuuauuuucaaaauaaguaguuuuuuuu

SEQ ID NO: 902 - RNA, 92 nt, Listeria innocua
auuguuaguauucaaaauaacauagcaaguuaaaauaaggcuuuguccguuaucaacuuuuaauuaaguagcgcuguuucggcgcuuuuuuu

SEQ ID NO: 903 - RNA, 89 nt, Streptococcus pyogenes
guuggaaccauucaaaacagcauagcaaguuaaaauaaggcuaguccguuaucaacuugaaaaaguggcaccgagucggugcuuuuuuu

SEQ ID NO: 904 - RNA, 107 nt, Streptococcus mutans
guuggaaucauucgaaacaacacagcaaguuaaaauaaggcagugauuuuuaauccaguccguacacaacuugaaaaagugcgcaccgauucggugcuuuuuuauuu

SEQ ID NO: 905 - RNA, 96 nt, Streptococcus thermophilus
uugugguuugaaaccauucgaaacaacacagcgaguuaaaauaaggcuuaguccguacucaacuugaaaagguggcaccgauucgguguuuuuuuu

SEQ ID NO: 906 - RNA, 102 nt, Neisseria meningitidis
acauauugucgcacugcgaaaugagaaccguugcuacaauaaggccgucugaaaagaugugccgcaacgcucugccccuuaaagcuucugcuuuaaggggca

SEQ ID NO: 907 - RNA, 110 nt, Pasteurella multocida; identical to SEQ ID NO: 855

SEQ ID NO: 908 - RNA, 37 nt, Francisella novicida
aacacaaguacauaccaaauaaucuaacaacugaaac

SEQ ID NO: 909 - RNA, 37 nt, Francisella novicida
aaauuauaaauguaccaaauaauuaaugcucuguaau

SEQ ID NO: 910 - RNA, 37 nt, Wolinella succinogenes; identical to SEQ ID NO: 881

SEQ ID NO: 911 - RNA, 37 nt, Wolinella succinogenes; identical to SEQ ID NO: 880

SEQ ID NO: 912 - RNA, 37 nt, gamma proteobacterium
auuucaguguauagaauguugggaugcauucugaaua

SEQ ID NO: 913 - RNA, 37 nt, gamma proteobacterium
auaacaagggaguauuugcuggaauaagcucugaaac

SEQ ID NO: 914 - RNA, 37 nt, Sutterella wadsworthensis
guuuccaagcaauagcucguggcguuaugauuucugu

SEQ ID NO: 915 - RNA, 37 nt, Sutterella wadsworthensis
ggugauuuccuauagcucauagcguuaugaucucuaa

SEQ ID NO: 916 - RNA, 37 nt, Legionella pneumophila; identical to SEQ ID NO: 872

SEQ ID NO: 917 - RNA, 36 nt, Listeria innocua; identical to SEQ ID NO: 862

SEQ ID NO: 918 - RNA, 36 nt, Streptococcus thermophilus; identical to SEQ ID NO: 860

SEQ ID NO: 919 - RNA, 36 nt, Streptococcus mutans; identical to SEQ ID NO: 859

SEQ ID NO: 920 - RNA, 36 nt, Streptococcus pyogenes; identical to SEQ ID NO: 858

SEQ ID NO: 921 - RNA, 36 nt, Fusobacterium nucleatum
auuuuuaauuuaaguaauaaaaaauggagcauauac

SEQ ID NO: 922 - RNA, 36 nt, Filifactor alocis
aguugacuaccauaugagauuacacuacacgguuca

SEQ ID NO: 923 - RNA, 36 nt, Treponema denticola; identical to SEQ ID NO: 864

SEQ ID NO: 924 - RNA, 36 nt, Solobacterium moorei
cuuauaccaguaagauaauuuacauaguaaguucaa

SEQ ID NO: 925 - RNA, 36 nt, Veillonella atypica
guuuuggagguuuacagaauuacacuacgaguucaa

SEQ ID NO: 926 - RNA, 36 nt, Finegoldia magna
guuuaauaccuauaugagauuacaucaugaguucaa

SEQ ID NO: 927 - RNA, 36 nt, Olsenella uli; identical to SEQ ID NO: 889

SEQ ID NO: 928 - RNA, 36 nt, Lactobacillus rhamnosus
caacuugaauugauugaucugacaucuacgaguuga

SEQ ID NO: 929 - RNA, 36 nt, Lactobacillus gasseri
ugauuagauuucauugaucuaacagccaucuaaaac

SEQ ID NO: 930 - RNA, 36 nt, Lactobacillus gasseri
acacuaaacuuuauugaucuaacaaccagauuuaaa

SEQ ID NO: 931 - RNA, 36 nt, Oenococcus kitaharae
ggguucuaccucauugaucugacacacagcauugaa

SEQ ID NO: 932 - RNA, 36 nt, Bifidobacterium bifidum; identical to SEQ ID NO: 868

SEQ ID NO: 933 - RNA, 36 nt, Staphylococcus pseudintermedius
guuuuacuucuuucuaaauaaacauaguuaaguuaa

SEQ ID NO: 934 - RNA, 36 nt, Eubacterium rectale
auuuuauagucacguaaauuuuucagaucuacuaaa

SEQ ID NO: 935 - RNA, 38 nt, Enterococcus faecalis
auuuuacugauaagaaauuauugagaaucuacaaaaau

SEQ ID NO: 936 - RNA, 36 nt, Streptococcus thermophilus; identical to SEQ ID NO: 861

SEQ ID NO: 937 - RNA, 36 nt, Staphylococcus lugdunensis
cuuguacuuauaccuaaaauuacagaaucuacugaa

SEQ ID NO: 938 - RNA, 36 nt, Eubacterium dolichum
aucauaaucuagcaaaaguuuauaugaucuaacaaa

SEQ ID NO: 939 - RNA, 36 nt, Mycoplasma mobile; identical to SEQ ID NO: 876

SEQ ID NO: 940 - RNA, 36 nt, Mycoplasma ovipneumoniae
auuuuacucuaguaagaaauugucgcacaaaaauaa

SEQ ID NO: 941 - RNA, 36 nt, Mycoplasma gallisepticum
auuauugcuuacacaauuauugucgugcuaaaauaa

SEQ ID NO: 942 - RNA, 36 nt, Mycoplasma canis
auuauuguuuacccaaauauuguacauccuaaauca

SEQ ID NO: 943 - RNA, 36 nt, Mycoplasma synoviae
uacuuacuuaacaaaauaauuguacgauuccaaaau

SEQ ID NO: 944 - RNA, 36 nt, Aminomonas paucivorans
gccuucccucccugccgaaggagcagauccucuccu

SEQ ID NO: 945 - RNA, 36 nt, Clostridium perfringens
uuauaguaacuaguuaaacucucgauaugcuauacc

SEQ ID NO: 946 - RNA, 36 nt, Clostridium cellulolyticum
auuauagcaacaauucaggcuccgauaugccauaau

SEQ ID NO: 947 - RNA, 36 nt, Acidovorax ebreus; identical to SEQ ID NO: 878

SEQ ID NO: 948 - RNA, 36 nt, Neisseria meningitidis; identical to SEQ ID NO: 865

SEQ ID NO: 949 - RNA, 36 nt, Pasteurella multocida
auuguugcacugcgaaaugagagacguugcuacaau

SEQ ID NO: 950 - RNA, 36 nt, phylotype Rs-D17
uuuguaacuuaucugagagaggaugguuauuauaau

SEQ ID NO: 951 - RNA, 36 nt, Wolinella succinogenes; identical to SEQ ID NO: 879

SEQ ID NO: 952 - RNA, 36 nt, Campylobacter jejuni
auaauacaaaaaucauuuuuuuaaacaaacauaaac

SEQ ID NO: 953 - RNA, 36 nt, Campylobacter jejuni
uauaaucucauaagaaauuuaaaaagggacuaaaau

SEQ ID NO: 954 - RNA, 36 nt, Helicobacter mustelae
guauuugucaauaaauauacuuuauaauggcaagau

SEQ ID NO: 955 - RNA, 36 nt, Roseburia intestinalis
uuguaauaaccuaauuaucacuugguaugauauaau

SEQ ID NO: 956 - RNA, 36 nt, Lactobacillus coryniformis
uuuuauucuauaguaaguuuucagcuaaaauagauc

SEQ ID NO: 957 - RNA, 36 nt, Rhodopseudomonas palustris; identical to SEQ ID NO: 888

SEQ ID NO: 958 - RNA, 36 nt, Cand. Puniceispirillum marinum
uaaccauaggcuccucaaucaccagaguguuauugc

SEQ ID NO: 959 - RNA, 36 nt, Verminephrobacter eiseniae; identical to SEQ ID NO: 893

SEQ ID NO: 960 - RNA, 36 nt, Ralstonia syzygii
guuaguagcaaagcgcaauucccgaucugcuggaaa

SEQ ID NO: 961 - RNA, 36 nt, Azospirillum B510
uuaacggcuggacccccgauccccaucgaauuucca

SEQ ID NO: 962 - RNA, 36 nt, Dinoroseobacter shibae; identical to SEQ ID NO: 892

SEQ ID NO: 963 - RNA, 36 nt, Rhodospirillum rubrum; identical to SEQ ID NO: 890

SEQ ID NO: 964 - RNA, 36 nt, Rhodospirillum rubrum; identical to SEQ ID NO: 891

SEQ ID NO: 965 - RNA, 36 nt, Spirochaeta Buddy
auuagagauaaucgcugguuuuuguuaagauauaac

SEQ ID NO: 966 - RNA, 36 nt, Prevotella ruminicola; identical to SEQ ID NO: 882

SEQ ID NO: 967 - RNA, 36 nt, Flavobacterium columnare
agauaaaauuauucuaaucuuuaaucuuaucacaau

SEQ ID NO: 968 - RNA, 36 nt, Parvibaculum lavamentivorans
cuugcgaaaagcgaccgccucucgauuugcuacaga

SEQ ID NO: 969 - RNA, 44 nt, Capnocytophaga ochracea; identical to SEQ ID NO: 877

SEQ ID NO: 970 - RNA, 48 nt, Fibrobacter succinogenes; identical to SEQ ID NO: 883

SEQ ID NO: 971 - RNA, 36 nt, Nitratifractor salsuginis; identical to SEQ ID NO: 873

SEQ ID NO: 972 - RNA, 36 nt, Akkermansia muciniphila
cuuauacgggaacuccacgauaaggcauuuuacaug

SEQ ID NO: 973 - RNA, 88 nt, Artificial Sequence
  Synthetic Sequence
uuggaaccauucaaaacagcauagcaaguuaaaauaaggcuaguccguuaucaacuugaaaaaguggcaccgagucggugcuuuuuuu

SEQ ID NO: 974 - RNA, 77 nt, Artificial Sequence
  Synthetic Sequence
caaaacagcauagcaaguuaaaauaaggcuaguccguuaucaacuugaaaaaguggcaccgagucggugcuuuuuuu

SEQ ID NO: 975 - RNA, 61 nt, Artificial Sequence
  Synthetic Sequence
caaaacagcauagcaaguuaaaauaaggcuaguccguuaucaacuugaaaaaguuuuuuuu

SEQ ID NO: 976 - RNA, 44 nt, Artificial Sequence
  Synthetic Sequence
caaaacagcauagcaaguuaaaauaaggcuaguccguuuuuuuu

SEQ ID NO: 977 - RNA, 72 nt, Artificial Sequence
  Synthetic Sequence
caaaacagcauagcaaguuaaaauaaggcuaguccgguucacugccguauaggcagcuaagaaauuuuuuuu

SEQ ID NO: 978 - RNA, 14 nt, Artificial Sequence
  Synthetic Sequence
uagcaaguuaaaau

SEQ ID NO: 979 - RNA, 102 nt, Artificial Sequence
  Synthetic Sequence
  misc_feature (1)..(80): n at each of these positions can be present or absent such that this region can contain anywhere from 7 to 80 nucleotides. n is a, c, g, or u
nnnnnnnnnnnnnnnnnnnnnnnnnnnnnnnnnnnnnnnnnnnnnnnnnnnnnnnnnnnnnnnnnnnnnnnnnnnnnnnnguuuuagagcuaugcuguuuug

SEQ ID NO: 980 - RNA, 102 nt, Artificial Sequence
  Synthetic Sequence
  misc_feature (1)..(80): n at each of these positions can be present or absent such that this region can contain anywhere from 7 to 80 nucleotides. n is a, c, g, or u
nnnnnnnnnnnnnnnnnnnnnnnnnnnnnnnnnnnnnnnnnnnnnnnnnnnnnnnnnnnnnnnnnnnnnnnnnnnnnnnnguuuuagagcuauguuauuuug

SEQ ID NO: 981 - RNA, 92 nt, exemplary
  misc_feature (1)..(80): n at each of these positions can be present or absent such that this region can contain anywhere from 7 to 80 nucleotides. n is a, c, g, or u
nnnnnnnnnnnnnnnnnnnnnnnnnnnnnnnnnnnnnnnnnnnnnnnnnnnnnnnnnnnnnnnnnnnnnnnnnnnnnnnnguuuuagagcua

SEQ ID NO: 982 - RNA, 152 nt, Artificial Sequence
  Synthetic Sequence
  misc_feature (37)..(116): n at each of these positions can be present or absent such that this region can contain anywhere from 12 to 80 nucleotides. n is a, c, g, or u
guuuuagagcuaugcuguuuugaauggucccaaaacnnnnnnnnnnnnnnnnnnnnnnnnnnnnnnnnnnnnnnnnnnnnnnnnnnnnnnnnnnnnnnnnnnnnnnnnnnnnnnnnguuuuagagcuaugcuguuuugaauggucccaaaac

SEQ ID NO: 983 - RNA, 188 nt, Artificial Sequence
  Synthetic Sequence
  misc_feature (37)..(116): n at each of these positions can be present or absent such that this region can contain anywhere from 12 to 80 nucleotides. n is a, c, g, or u
guuuuagagcuaugcuguuuugaauggucccaaaacnnnnnnnnnnnnnnnnnnnnnnnnnnnnnnnnnnnnnnnnnnnnnnnnnnnnnnnnnnnnnnnnnnnnnnnnnnnnnnnnguuuuagagcuaugcuguuuugaauggucccaaaacguuuuagagcuaugcuguuuugaauggucccaaaac

SEQ ID NO: 984 - RNA, 22 nt, exemplary
guuuuagagcuaugcuguuuug

SEQ ID NO: 985 - RNA, 36 nt, Streptococcus pyogenes
guuuuagagcuaugcuguuuugaauggucccaaaac

SEQ ID NO: 986 - RNA, 36 nt, Pasteurella multocida
guuguaguucccucucucauuucgcagugcuacaau

SEQ ID NO: 987 - RNA, 36 nt, Mycoplasma mobile
guuuugguguaguaucauucuuauguauucuuaaac

SEQ ID NO: 988 - RNA, 37 nt, Francisella novicida
guuucaguugcugaauuauuugguaaacuacuguuag

SEQ ID NO: 989 - RNA, 33 nt, Francisella novicida
guuucaguugcugaauuauuugguaaacuacug

SEQ ID NO: 990 - RNA, 36 nt, Streptococcus mutans
guuuuagagcuguguuguuucgaaugguuccaaaac

SEQ ID NO: 991 - RNA, 36 nt, Streptococcus thermophilus; identical to SEQ ID NO: 990

SEQ ID NO: 992 - RNA, 36 nt, Streptococcus thermophilus
guuuuuguacucucaagauuuaaguaacuguacaac

SEQ ID NO: 993 - RNA, 36 nt, Listeria innocua
guuuuagagcuauguuauuuugaaugcuaacaaaac

SEQ ID NO: 994 - RNA, 36 nt, Treponema denticola
guuugagaguuguguaauuuaagauggaucucaaac

SEQ ID NO: 995 - RNA, 36 nt, Neisseria meningitidis
guuguagcucccuuucucauuucgcagugcuacaau

SEQ ID NO: 996 - RNA, 36 nt, Streptococcus gordonii; identical to SEQ ID NO: 992

SEQ ID NO: 997 - RNA, 35 nt, Bifidobacterium bifidum
guuucaaugccugucagaucaaugacuuugaccac

SEQ ID NO: 998 - RNA, 36 nt, Lactobacillus salivarius
guuucagaaguauguuaaaucaauaagguuaagacc

SEQ ID NO: 999 - RNA, 37 nt, Francisella novicida
cuaacaguaguuuaccaaauaauucagcaacugaaac

SEQ ID NO: 1000 - RNA, 37 nt, Francisella novicida; identical to SEQ ID NO: 999

SEQ ID NO: 1001 - RNA, 37 nt, Legionella pneumophila
ccaauaaucccucaucuaaaaauccaaccacugaaac

SEQ ID NO: 1002 - RNA, 36 nt, Nitratifractor salsuginis
guuuuaagaccccucaaaaccccacccuguuacaau

SEQ ID NO: 1003 - RNA, 36 nt, Butyrivibrio fibrisolvens
guuuuaguacccgggaaaauuaagugauuggaaaac

SEQ ID NO: 1004 - RNA, 36 nt, Streptobacillus moniliformis
gauacagauucuugguaaauuugaauaaugugaaug

SEQ ID NO: 1005 - RNA, 36 nt, Mycoplasma mobile; identical to SEQ ID NO: 987

SEQ ID NO: 1006 - RNA, 44 nt, Capnocytophaga ochracea
uguuaucaaucgcaaaacuacaaaauuugaaagcaauucacaac

SEQ ID NO: 1007 - RNA, 36 nt, Acidovorax ebreus
aguguagcuauccggggugagagagggagcuacaac

SEQ ID NO: 1008 - RNA, 36 nt, Wolinella succinogenes
auuauagcgaggaauggcugaguaggcggcuauaac

SEQ ID NO: 1009 - RNA, 37 nt, Wolinella succinogenes
gcaacacuuuauagcaaauccgcuuagccugugaaac

SEQ ID NO: 1010 - RNA, 37 nt, Wolinella succinogenes; identical to SEQ ID NO: 1009

SEQ ID NO: 1011 - RNA, 36 nt, Prevotella ruminicola
guugugguuugauguaggaaaggaaugauauacaac

SEQ ID NO: 1012 - RNA, 48 nt, Fibrobacter succinogenes
guuguuauugcacuaguaaaacuagaaaaucugaaagcaauucacaac

SEQ ID NO: 1013 - RNA, 36 nt, Campylobacter jejuni
auuuuaccauaaagaaauuuaaaaagggacuaaaac

SEQ ID NO: 1014 - RNA, 36 nt, Campylobacter jejuni
guuuuagucccuuuuuaaauuucuuuaugguaaaau

SEQ ID NO: 1015 - RNA, 36 nt, Pasteurella multocida
auuguagcacugcgaaaugagagagggaacuacaac

SEQ ID NO: 1016 - RNA, 36 nt, Rhodopseudomonas palustris
agccuaccacggggaaaucgguagggaagccacggc

SEQ ID NO: 1017 - RNA, 36 nt, Olsenella uli
guuuuggggcagugucguuuugacugguaaucaaac

SEQ ID NO: 1018 - RNA, 36 nt, Rhodospirillum rubrum
acucuaccauggcggugugggacggggccauggaac

SEQ ID NO: 1019 - RNA, 36 nt, Rhodospirillum rubrum; identical to SEQ ID NO: 1018

SEQ ID NO: 1020 - RNA, 36 nt, Dinoroseobacter shibae
aguuuagcuguucagaauucgggguccagccgcaac

SEQ ID NO: 1021 - RNA, 36 nt, Verminephrobacter eiseniae
auuguagcucacugggauaugcgcacuggccggaac

SEQ ID NO: 1022 - RNA, 37 nt, Francisella novicida; identical to SEQ ID NO: 988

SEQ ID NO: 1023 - RNA, 37 nt, Francisella novicida; identical to SEQ ID NO: 988

SEQ ID NO: 1024 - RNA, 37 nt, Wolinella succinogenes; identical to SEQ ID NO: 1009

SEQ ID NO: 1025 - RNA, 37 nt, Wolinella succinogenes; identical to SEQ ID NO: 1009

SEQ ID NO: 1026 - RNA, 37 nt, gamma proteobacterium
guuucagagcuuaucccaacaaaccaacagcugaaac

SEQ ID NO: 1027 - RNA, 37 nt, gamma proteobacterium; identical to SEQ ID NO: 1026

SEQ ID NO: 1028 - RNA, 37 nt, Sutterella wadsworthensis
gcgaagaucauaacgcuacgagcuauagcacugaaac

SEQ ID NO: 1029 - RNA, 37 nt, Sutterella wadsworthensis; identical to SEQ ID NO: 1028

SEQ ID NO: 1030 - RNA, 37 nt, Legionella pneumophila; identical to SEQ ID NO: 1001

SEQ ID NO: 1031 - RNA, 36 nt, Listeria innocua; identical to SEQ ID NO: 993

SEQ ID NO: 1032 - RNA, 36 nt, Streptococcus thermophilus; identical to SEQ ID NO: 990

SEQ ID NO: 1033 - RNA, 36 nt, Streptococcus mutans; identical to SEQ ID NO: 990

SEQ ID NO: 1034 - RNA, 36 nt, Streptococcus pyogenes; identical to SEQ ID NO: 985

SEQ ID NO: 1035 - RNA, 36 nt, Fusobacterium nucleatum
guuugagaguaauguuauuuuaaauagauucaaaac

SEQ ID NO: 1036 - RNA, 36 nt, Filifactor alocis
guuugagaguaguguaauuucauaugguagucaaac

SEQ ID NO: 1037 - RNA, 36 nt, Treponema denticola; identical to SEQ ID NO: 994

SEQ ID NO: 1038 - RNA, 36 nt, Solobacterium moorei
guuugagaacuauguaaauuaugcugguagcaaaac

SEQ ID NO: 1039 - RNA, 36 nt, Veillonella atypica
guuugcgaguaguguaauucuguaaaucucuaaaac

SEQ ID NO: 1040 - RNA, 36 nt, Finegoldia magna
guuugagaaugauguaauuucauauagguauuaaac

SEQ ID NO: 1041 - RNA, 36 nt, Olsenella uli; identical to SEQ ID NO: 1017

SEQ ID NO: 1042 - RNA, 36 nt, Lactobacillus rhamnosus
gucucagguagaugucagaucaaucaguucaagagc

SEQ ID NO: 1043 - RNA, 36 nt, Lactobacillus gasseri
guuuuagaugguuguuagaucaauaagguuuagauc

SEQ ID NO: 1044 - RNA, 36 nt, Lactobacillus gasseri; identical to SEQ ID NO: 1043

SEQ ID NO: 1045 - RNA, 36 nt, Oenococcus kitaharae
gcuucagaugugugucagaucaaugagguagaaccc

SEQ ID NO: 1046 - RNA, 36 nt, Bifidobacterium bifidum
guuucagaugccugucagaucaaugacuuugaccac

SEQ ID NO: 1047 - RNA, 36 nt, Staphylococcus pseudintermedius
guuuuagcacuauguuuauuuagaaagagguaaaac

SEQ ID NO: 1048 - RNA, 36 nt, Eubacterium rectale
auuuuaguaacugaauaauuuacgugacuguaaaac

SEQ ID NO: 1049 - RNA, 36 nt, Enterococcus faecalis
guuuuuguauucucaauaauuucuuaucaguaaaac

SEQ ID NO: 1050 - RNA, 36 nt, Streptococcus thermophilus; identical to SEQ ID NO: 992

SEQ ID NO: 1051 - RNA, 36 nt, Staphylococcus lugdunensis
guuuuaguacucuguaauuuuagguauaagugauac

SEQ ID NO: 1052 - RNA, 36 nt, Eubacterium dolichum
guuuuguuaccauauggauuuuugcuagauuaagac

SEQ ID NO: 1053 - RNA, 36 nt, Mycoplasma mobile; identical to SEQ ID NO: 987

SEQ ID NO: 1054 - RNA, 36 nt, Mycoplasma ovipneumoniae
guuuuugugcuguacaauuucuuacuagaguaaaac

SEQ ID NO: 1055 - RNA, 36 nt, Mycoplasma gallisepticum
guuuuagcacuguacaauacuuguguaagcaauaac

SEQ ID NO: 1056 - RNA, 36 nt, Mycoplasma canis
guuuuaguguuguacaauauuuggguaaacaauaac

SEQ ID NO: 1057 - RNA, 36 nt, Mycoplasma synoviae
guuuugggguuguacaauuauuuuguuaaguaaaac

SEQ ID NO: 1058 - RNA, 36 nt, Aminomonas paucivorans
agcauagcauuucggagugcggcagggagcuaugac

SEQ ID NO: 1059 - RNA, 36 nt, Clostridium perfringens
auuauagcauaucgagaauuuacuaggaacuauaac

SEQ ID NO: 1060 - RNA, 36 nt, Clostridium cellulolyticum
auuauagcauaucggagccugaauuggagcuauaac

SEQ ID NO: 1061 - RNA, 36 nt, Acidovorax ebreus; identical to SEQ ID NO: 1007

SEQ ID NO: 1062 - RNA, 36 nt, Neisseria meningitidis; identical to SEQ ID NO: 995

SEQ ID NO: 1063 - RNA, 36 nt, Pasteurella multocida; identical to SEQ ID NO: 986

SEQ ID NO: 1064 - RNA, 36 nt, phylotype Rs-D17
guuauaguuuccuuccucucucagaugugcuauaau

SEQ ID NO: 1065 - RNA, 36 nt, Wolinella succinogenes; identical to SEQ ID NO: 1008

SEQ ID NO: 1066 - RNA, 36 nt, Campylobacter jejuni; identical to SEQ ID NO: 1014

SEQ ID NO: 1067 - RNA, 36 nt, Campylobacter jejuni; identical to SEQ ID NO: 1014

SEQ ID NO: 1068 - RNA, 36 nt, Helicobacter mustelae
auuuuagcauaaacauauuuaugaaguggcuaaaac

SEQ ID NO: 1069 - RNA, 36 nt, Roseburia intestinalis
auuauaccauaccaagugauaacagggaauuacaac

SEQ ID NO: 1070 - RNA, 36 nt, Lactobacillus coryniformis
gaucuauuuuagcugaaaacugaaggaaucaauagc

SEQ ID NO: 1071 - RNA, 36 nt, Rhodopseudomonas palustris; identical to SEQ ID NO: 1016

SEQ ID NO: 1072 - RNA, 36 nt, Cand. Puniceispirillum marinum
aguauagcacucuggugauugagagccuagagcaac

SEQ ID NO: 1073 - RNA, 36 nt, Verminephrobacter eiseniae; identical to SEQ ID NO: 1021

SEQ ID NO: 1074 - RNA, 36 nt, Ralstonia syzygii
agguuagcagaucgggaauugcgcucuggcuacaac

SEQ ID NO: 1075 - RNA, 36 nt, Azospirillum B510
aguguagccgauggggaucggggguccagccgcaac

SEQ ID NO: 1076 - RNA, 36 nt, Dinoroseobacter shibae; identical to SEQ ID NO: 1020

SEQ ID NO: 1077 - RNA, 36 nt, Rhodospirillum rubrum; identical to SEQ ID NO: 1018

SEQ ID NO: 1078 - RNA, 36 nt, Rhodospirillum rubrum; identical to SEQ ID NO: 1018

SEQ ID NO: 1079 - RNA, 36 nt, Spirochaeta Buddy
ggucaaucuuaacaaaaaucagcggucauccccaac

SEQ ID NO: 1080 - RNA, 36 nt, Prevotella ruminicola; identical to SEQ ID NO: 1011

SEQ ID NO: 1081 - RNA, 36 nt, Flavobacterium columnare
guugugguuugauuaaagauuagaaaacacgauauu

SEQ ID NO: 1082 - RNA, 36 nt, Parvibaculum lavamentivorans
agaguagcaaaucgagagacggccgcaauccgcagc

SEQ ID NO: 1083 - RNA, 44 nt, Capnocytophaga ochracea; identical to SEQ ID NO: 1006

SEQ ID NO: 1084 - RNA, 48 nt, Fibrobacter succinogenes; identical to SEQ ID NO: 1012

SEQ ID NO: 1085 - RNA, 36 nt, Nitratifractor salsuginis; identical to SEQ ID NO: 1002

SEQ ID NO: 1086 - RNA, 36 nt, Akkermansia muciniphila
guuguacugugccuuauuuuggauucaaggcaaaac

SEQ ID NO: 1087 - RNA, 44 nt, Artificial Sequence
  Synthetic Sequence
guuuuagagcuagaaauagcaaguuaaaauaaggcuaguccguu

SEQ ID NO: 1088 - RNA, 60 nt, Artificial Sequence
  Synthetic Sequence
  misc_feature (13)..(17): n is a, c, g, or u
guuuuagagcuannnnnuagcaaguuaaaauaaguuaaaauaaggcuaguccguuaucaa

SEQ ID NO: 1089 - RNA, 68 nt, Artificial Sequence
  Synthetic Sequence
guuuuagagcuaugcugaaaagcauagcaaguuaaaaauaaguuaaaauaaggcuaguccguuaucaa

SEQ ID NO: 1090 - RNA, 69 nt, Artificial Sequence
  Synthetic Sequence
guuuuagagcuaugcuguuuuggaaacaaaacagcauagcaaguuaaaauaaggcuaguccguuaucaa

SEQ ID NO: 1091 - RNA, 70 nt, Artificial Sequence
  Synthetic Sequence
guuuuagagcuaguuuuagagcuagaaauagcaaguuaaaauuagcaaguuaaaauaaggcuaguccguu

SEQ ID NO: 1092 - RNA, 70 nt, Artificial Sequence
  Synthetic Sequence
guuuuagagcuauagcaaguuaaaaugaaaguuuuagagcuauagcaaguuaaaauaaggcuaguccguu

SEQ ID NO: 1093 - RNA, 74 nt, Artificial Sequence
  Synthetic Sequence
guuuuagagcuagaaauagcaaguuaaaauguuuuagagcuagaaauagcaaguuaaaauaaggcuaguccguu

SEQ ID NO: 1094 - RNA, 119 nt, Artificial Sequence
  Synthetic Sequence
guuuuagagcuaugcuguuuuggaaacaaaacagcauagcaaguuaaaauguuuuagagcuaugcuguuuuggaaacaaaacagcauagcaaguuaaaauaaggcuaguccguuaucaa

SEQ ID NO: 1095 - RNA, 12 nt, Artificial Sequence
  Synthetic Sequence
guuuuagagcua

SEQ ID NO: 1096 - RNA, 19 nt, Artificial Sequence
  Synthetic Sequence
aauuucuacuguuguagau

SEQ ID NO: 1097 - RNA, 19 nt, Artificial Sequence
  Synthetic Sequence
aauuucugcuguugcagau

SEQ ID NO: 1098 - RNA, 19 nt, Artificial Sequence
  Synthetic Sequence
aauuuccacuguuguggau

SEQ ID NO: 1099 - RNA, 19 nt, Artificial Sequence
  Synthetic Sequence
aauuccuacuguuguaggu

SEQ ID NO: 1100 - RNA, 19 nt, Artificial Sequence
  Synthetic Sequence
aauuucuacuauuguagau

SEQ ID NO: 1101 - RNA, 19 nt, Artificial Sequence
  Synthetic Sequence
aauuucuacugcuguagau

SEQ ID NO: 1102 - RNA, 18 nt, Artificial Sequence
  Synthetic Sequence
aauuucuacuuuguagau

SEQ ID NO: 1103 - RNA, 17 nt, Artificial Sequence
  Synthetic Sequence
aauuucuacuuguagau

SEQ ID NO: 1104 - RNA, 67 nt, Artificial Sequence
  Synthetic Sequence
gaauuuuucaacgggugugccaauggccacuuuccagguggcaaagcccguugagcuucucaaaaag

SEQ ID NO: 1105 - RNA, 79 nt, Artificial Sequence
  Synthetic Sequence
gucuagaggacagaauuuuucaacgggugugccaauggccacuuuccagguggcaaagcccguugagcuucucaaaaag

SEQ ID NO: 1106 - RNA, 78 nt, Artificial Sequence
  Synthetic Sequence
ucuagaggacagaauuuuucaacgggugugccaauggccacuuuccagguggcaaagcccguugagcuucucaaaaag

SEQ ID NO: 1107 - RNA, 36 nt, Artificial Sequence
  Synthetic Sequence
acuuuccaggcaaagcccguugagcuucucaaaaag

SEQ ID NO: 1108 - RNA, 9 nt, Artificial Sequence
  Synthetic Sequence
agcuucuca

SEQ ID NO: 1109 - RNA, 8 nt, Artificial Sequence
  Synthetic Sequence
gcuucuca

SEQ ID NO: 1110 - RNA, 34 nt, Artificial Sequence
  Synthetic Sequence
  misc_feature (15)..(34): n is a, c, g, or u
cugagaaguggcacnnnnnnnnnnnnnnnnnnnn

SEQ ID NO: 1111 - RNA, 14 nt, Artificial Sequence
  Synthetic Sequence
cugagaaguggcac

SEQ ID NO: 1112 - RNA, 9 nt, Artificial Sequence
  Synthetic Sequence
cugagaagu

SEQ ID NO: 1113 - RNA, 13 nt, Artificial Sequence
  Synthetic Sequence
ugagaaguggcac

SEQ ID NO: 1114 - RNA, 8 nt, Artificial Sequence
  Synthetic Sequence
ugagaagu

SEQ ID NO: 1115 - protein, 986 aa, Deltaproteobacteria
MEKRINKIRKKLSADNATKPVSRSGPMKTLLVRVMTDDLKKRLEKRRKKPEVMPQVISNNAANNLRMLLDDYTKMKEAILQVYWQEFKDDHVGLMCKFAQPASKKIDQNKLKPEMDEKGNLTTAGFACSQCGQPLFVYKLEQVSEKGKAYTNYFGRCNVAEHEKLILLAQLKPEKDSDEAVTYSLGKFGQRALDFYSIHVTKESTHPVKPLAQIAGNRYASGPVGKALSDACMGTIASFLSKYQDIIIEHQKVVKGNQKRLESLRELAGKENLEYPSVTLPPQPHTKEGVDAYNEVIARVRMWVNLNLWQKLKLSRDDAKPLLRLKGFPSFPVVERRENEVDWWNTINEVKKLIDAKRDMGRVFWSGVTAEKRNTILEGYNYLPNENDHKKREGSLENPKKPAKRQFGDLLLYLEKKYAGDWGKVFDEAWERIDKKIAGLTSHIEREEARNAEDAQSKAVLTDWLRAKASFVLERLKEMDEKEFYACEIQLQKWYGDLRGNPFAVEAENRVVDISGFSIGSDGHSIQYRNLLAWKYLENGKREFYLLMNYGKKGRIRFTDGTDIKKSGKWQGLLYGGGKAKVIDLTFDPDDEQLIILPLAFGTRQGREFIWNDLLSLETGLIKLANGRVIEKTIYNKKIGRDEPALFVALTFERREVVDPSNIKPVNLIGVDRGENIPAVIALTDPEGCPLPEFKDSSGGPTDILRIGEGYKEKQRAIQAAKEVEQRRAGGYSRKFASKSRNLADDMVRNSARDLFYHAVTHDAVLVFENLSRGFGRQGKRTFMTERQYTKMEDWLTAKLAYEGLTSKTYLSKTLAQYTSKTCSNCGFTITTADYDGMLVRLKKTSDGWATTLNNKELKAEGQITYYNRYKRQTVEKELSAELDRLSEESGNNDISKWTKGRRDEALFLLKKRFSHRPVQEQFVCLDCGHEVHADEQAALNIARSWLFLNSNSTEFKSYKSGKQPFVGAWQAFYKRRLKEVWKPNA

SEQ ID NO: 1116 - protein, 978 aa, Planctomycetes
MQEIKRINKIRRRLVKDSNTKKAGKTGPMKTLLVRVMTPDLRERLENLRKKPENIPQPISNTSRANLNKLLTDYTEMKKAILHVYWEEFQKDPVGLMSRVAQPAPKNIDQRKLIPVKDGNERLTSSGFACSQCCQPLYVYKLEQVNDKGKPHTNYFGRCNVSEHERLILLSPHKPEANDELVTYSLGKFGQRALDFYSIHVTRESNHPVKPLEQIGGNSCASGPVGKALSDACMGAVASFLTKYQDIILEHQKVIKKNEKRLANLKDIASANGLAFPKITLPPQPHTKEGIEAYNNVVAQIVIWVNLNLWQKLKIGRDEAKPLQRLKGFPSFPLVERQANEVDWWDMVCNVKKLINEKKEDGKVFWQNLAGYKRQEALLPYLSSEEDRKKGKKFARYQFGDLLLHLEKKHGEDWGKVYDEAWERIDKKVEGLSKHIKLEEERRSEDAQSKAALTDWLRAKASFVIEGLKEADKDEFCRCELKLQKWYGDLRGKPFAIEAENSILDISGFSKQYNCAFIWQKDGVKKLNLYLIINYFKGGKLRFKKIKPEAFEANRFYTVINKKSGEIVPMEVNFNFDDPNLIILPLAFGKRQGREFIWNDLLSLETGSLKLANGRVIEKTLYNRRTRQDEPALFVALTFERREVLDSSNIKPMNLIGIDRGENIPAVIALTDPEGCPLSRFKDSLGNPTHILRIGESYKEKQRTIQAAKEVEQRRAGGYSRKYASKAKNLADDMVRNTARDLLYYAVTQDAMLIFENLSRGFGRQGKRTFMAERQYTRMEDWLTAKLAYEGLPSKTYLSKTLAQYTSKTCSNCGFTITSADYDRVLEKLKKTATGWMTTINGKELKVEGQITYYNRYKRQNVVKDLSVELDRLSEESVNNDISSWTKGRSGEALSLLKKRFSHRPVQEKFVCLNCGFETHADEQAALNIARSWLFLRSQEYKKYQTNKTTGNTDKRAFVETWQSFYRKKLKEVWKPAV

SEQ ID NO: 1117 - protein, 1125 aa, Candidatus Katanobacteria
MRKKLFKGYILHNKRLVYTGKAAIRSIKYPLVAPNKTALNNLSEKIIYDYEHLFGPLNVASYARNSNRYSLVDFWIDSLRAGVIWQSKSTSLIDLISKLEGSKSPSEKIFEQIDFELKNKLDKEQFKDIILLNTGIRSSSNVRSLRGRFLKCFKEEFRDTEEVIACVDKWSKDLIVEGKSILVSKQFLYWEEEFGIKIFPHFKDNHDLPKLTFFVEPSLEFSPHLPLANCLERLKKFDISRESLLGLDNNFSAFSNYFNELFNLLSRGEIKKIVTAVLAVSKSWENEPELEKRLHFLSEKAKLLGYPKLTSSWADYRMIIGGKIKSWHSNYTEQLIKVREDLKKHQIALDKLQEDLKKVVDSSLREQIEAQREALLPLLDTMLKEKDFSDDLELYRFILSDFKSLLNGSYQRYIQTEEERKEDRDVTKKYKDLYSNLRNIPRFFGESKKEQFNKFINKSLPTIDVGLKILEDIRNALETVSVRKPPSITEEYVTKQLEKLSRKYKINAFNSNRFKQITEQVLRKYNNGELPKISEVFYRYPRESHVAIRILPVKISNPRKDISYLLDKYQISPDWKNSNPGEVVDLIEIYKLTLGWLLSCNKDFSMDFSSYDLKLFPEAASLIKNFGSCLSGYYLSKMIFNCITSEIKGMITLYTRDKFVVRYVTQMIGSNQKFPLLCLVGEKQTKNFSRNWGVLIEEKGDLGEEKNQEKCLIFKDKTDFAKAKEVEIFKNNIWRIRTSKYQIQFLNRLFKKTKEWDLMNLVLSEPSLVLEEEWGVSWDKDKLLPLLKKEKSCEERLYYSLPLNLVPATDYKEQSAEIEQRNTYLGLDVGEFGVAYAVVRIVRDRIELLSWGFLKDPALRKIRERVQDMKKKQVMAVFSSSSTAVARVREMAIHSLRNQIHSIALAYKAKIIYEISISNFETGGNRMAKIYRSIKVSDVYRESGADTLVSEMIWGKKNKQMGNHISSYATSYTCCNCARTPFELVIDNDKEYEKGGDEFIFNVGDEKKVRGFLQKSLLGKTIKGKEVLKSIKEYARPPIREVLLEGEDVEQLLKRRGNSYIYRCPFCGYKTDADIQAALNIACRGYISDNAKDAVKEGERKLDYILEVRKLWEKNGAVLRSAKFL

SEQ ID NO: 1118 - protein, 1226 aa, Candidatus Vogelbacteria
MQKVRKTLSEVHKNPYGTKVRNAKTGYSLQIERLSYTGKEGMRSFKIPLENKNKEVFDEFVKKIRNDYISQVGLLNLSDWYEHYQEKQEHYSLADFWLDSLRAGVIFAHKETEIKNLISKIRGDKSIVDKFNASIKKKHADLYALVDIKALYDFLTSDARRGLKTEEEFFNSKRNTLFPKFRKKDNKAVDLWVKKFIGLDNKDKLNFTKKFIGFDPNPQIKYDHTFFFHQDINFDLERITTPKELISTYKKFLGKNKDLYGSDETTEDQLKMVLGFHNNHGAFSKYFNASLEAFRGRDNSLVEQIINNSPYWNSHRKELEKRIIFLQVQSKKIKETELGKPHEYLASFGGKFESWVSNYLRQEEEVKRQLFGYEENKKGQKKFIVGNKQELDKIIRGTDEYEIKAISKETIGLTQKCLKLLEQLKDSVDDYTLSLYRQLIVELRIRLNVEFQETYPELIGKSEKDKEKDAKNKRADKRYPQIFKDIKLIPNFLGETKQMVYKKFIRSADILYEGINFIDQIDKQITQNLLPCFKNDKERIEFTEKQFETLRRKYYLMNSSRFHHVIEGIINNRKLIEMKKRENSELKTFSDSKFVLSKLFLKKGKKYENEVYYTFYINPKARDQRRIKIVLDINGNNSVGILQDLVQKLKPKWDDIIKKNDMGELIDAIEIEKVRLGILIALYCEHKFKIKKELLSLDLFASAYQYLELEDDPEELSGTNLGRFLQSLVCSEIKGAINKISRTEYIERYTVQPMNTEKNYPLLINKEGKATWHIAAKDDLSKKKGGGTVAMNQKIGKNFFGKQDYKTVFMLQDKRFDLLTSKYHLQFLSKTLDTGGGSWWKNKNIDLNLSSYSFIFEQKVKVEWDLTNLDHPIKIKPSENSDDRRLFVSIPFVIKPKQTKRKDLQTRVNYMGIDIGEYGLAWTIINIDLKNKKINKISKQGFIYEPLTHKVRDYVATIKDNQVRGTFGMPDTKLARLRENAITSLRNQVHDIAMRYDAKPVYEFEISNFETGSNKVKVIYDSVKRADIGRGQNNTEADNTEVNLVWGKTSKQFGSQIGAYATSYICSFCGYSPYYEFENSKSGDEEGARDNLYQMKKLSRPSLEDFLQGNPVYKTFRDFDKYKNDQRLQKTGDKDGEWKTHRGNTAIYACQKCRHISDADIQASYWIALKQVVRDFYKDKEMDGDLIQGDNKDKRKVNELNRLIGVHKDVPIINKNLITSLDINLL

SEQ ID NO: 1119 - protein, 1200 aa, Candidatus Vogelbacteria
MKAKKSFYNQKRKFGKRGYRLHDERIAYSGGIGSMRSIKYELKDSYGIAGLRNRIADATISDNKWLYGNINLNDYLEWRSSKTDKQIEDGDRESSLLGFWLEALRLGFVFSKQSHAPNDFNETALQDLFETLDDDLKHVLDRKKWCDFIKIGTPKTNDQGRLKKQIKNLLKGNKREEIEKTLNESDDELKEKINRIADVFAKNKSDKYTIFKLDKPNTEKYPRINDVQVAFFCHPDFEEITERDRTKTLDLIINRFNKRYEITENKKDDKTSNRMALYSLNQGYIPRVLNDLFLFVKDNEDDFSQFLSDLENFFSFSNEQIKIIKERLKKLKKYAEPIPGKPQLADKWDDYASDFGGKLESWYSNRIEKLKKIPESVSDLRNNLEKIRNVLKKQNNASKILELSQKIIEYIRDYGVSFEKPEIIKFSWINKTKDGQKKVFYVAKMADREFIEKLDLWMADLRSQLNEYNQDNKVSFKKKGKKIEELGVLDFALNKAKKNKSTKNENGWQQKLSESIQSAPLFFGEGNRVRNEEVYNLKDLLFSEIKNVENILMSSEAEDLKNIKIEYKEDGAKKGNYVLNVLARFYARFNEDGYGGWNKVKTVLENIAREAGTDFSKYGNNNNRNAGRFYLNGRERQVFTLIKFEKSITVEKILELVKLPSLLDEAYRDLVNENKNHKLRDVIQLSKTIMALVLSHSDKEKQIGGNYIHSKLSGYNALISKRDFISRYSVQTTNGTQCKLAIGKGKSKKGNEIDRYFYAFQFFKNDDSKINLKVIKNNSHKNIDFNDNENKINALQVYSSNYQIQFLDWFFEKHQGKKTSLEVGGSFTIAEKSLTIDWSGSNPRVGFKRSDTEEKRVFVSQPFTLIPDDEDKERRKERMIKTKNRFIGIDIGEYGLAWSLIEVDNGDKNNRGIRQLESGFITDNQQQVLKKNVKSWRQNQIRQTFTSPDTKIARLRESLIGSYKNQLESLMVAKKANLSFEYEVSGFEVGGKRVAKIYDSIKRGSVRKKDNNSQNDQSWGKKGINEWSFETTAAGTSQFCTHCKRWSSLAIVDIEEYELKDYNDNLFKVKINDGEVRLLGKKGWRSGEKIKGKELFGPVKDAMRPNVDGLGMKIVKRKYLKLDLRDWVSRYGNMAIFICPYVDCHHISHADKQAAFNIAVRGYLKSVNPDRAIKHGDKGLSRDFLCQEEGKLNFEQIGLL

SEQ ID NO: 1120 - protein, 1210 aa, Candidatus Parcubacteria
MSKRHPRISGVKGYRLHAQRLEYTGKSGAMRTIKYPLYSSPSGGRTVPREIVSAINDDYVGLYGLSNFDDLYNAEKRNEEKVYSVLDFWYDCVQYGAVFSYTAPGLLKNVAEVRGGSYELTKTLKGSHLYDELQIDKVIKFLNKKEISRANGSLDKLKKDIIDCFKAEYRERHKDQCNKLADDIKNAKKDAGASLGERQKKLFRDFFGISEQSENDKPSFTNPLNLTCCLLPFDTVNNNRNRGEVLFNKLKEYAQKLDKNEGSLEMWEYIGIGNSGTAFSNFLGEGFLGRLRENKITELKKAMMDITDAWRGQEQEEELEKRLRILAALTIKLREPKFDNHWGGYRSDINGKLSSWLQNYINQTVKIKEDLKGHKKDLKKAKEMINRFGESDTKEEAVVSSLLESIEKIVPDDSADDEKPDIPAIAIYRRFLSDGRLTLNRFVQREDVQEALIKERLEAEKKKKPKKRKKKSDAEDEKETIDFKELFPHLAKPLKLVPNFYGDSKRELYKKYKNAAIYTDALWKAVEKIYKSAFSSSLKNSFFDTDFDKDFFIKRLQKIFSVYRRFNTDKWKPIVKNSFAPYCDIVSLAENEVLYKPKQSRSRKSAAIDKNRVRLPSTENIAKAGIALARELSVAGFDWKDLLKKEEHEEYIDLIELHKTALALLLAVTETQLDISALDFVENGTVKDFMKTRDGNLVLEGRFLEMFSQSIVFSELRGLAGLMSRKEFITRSAIQTMNGKQAELLYIPHEFQSAKITTPKEMSRAFLDLAPAEFATSLEPESLSEKSLLKLKQMRYYPHYFGYELTRTGQGIDGGVAENALRLEKSPVKKREIKCKQYKTLGRGQNKIVLYVRSSYYQTQFLEWFLHRPKNVQTDVAVSGSFLIDEKKVKTRWNYDALTVALEPVSGSERVFVSQPFTIFPEKSAEEEGQRYLGIDIGEYGIAYTALEITGDSAKILDQNFISDPQLKTLREEVKGLKLDQRRGTFAMPSTKIARIRESLVHSLRNRIHHLALKHKAKIVYELEVSRFEEGKQKIKKVYATLKKADVYSEIDADKNLQTTVWGKLAVASEISASYTSQFCGACKKLWRAEMQVDETITTQELIGTVRVIKGGTLIDAIKDFMRPPIFDENDTPFPKYRDFCDKHHISKKMRGNSCLFICPFCRANADADIQASQTIALLRYVKEEKKVEDYFERFRKLKNIKVLGQMKKI

SEQ ID NO: 1121 - protein, 1192 aa, Candidatus Komeilibacteria
MAESKQMQCRKCGASMKYEVIGLGKKSCRYMCPDCGNHTSARKIQNKKKRDKKYGSASKAQSQRIAVAGALYPDKKVQTIKTYKYPADLNGEVHDRGVAEKIEQAIQEDEIGLLGPSSEYACWIASQKQSEPYSVVDFWFDAVCAGGVFAYSGARLLSTVLQLSGEESVLRAALASSPFVDDINLAQAEKFLAVSRRTGQDKLGKRIGECFAEGRLEALGIKDRMREFVQAIDVAQTAGQRFAAKLKIFGISQMPEAKQWNNDSGLTVCILPDYYVPEENRADQLVVLLRRLREIAYCMGIEDEAGFEHLGIDPGALSNFSNGNPKRGFLGRLLNNDIIALANNMSAMTPYWEGRKGELIERLAWLKHRAEGLYLKEPHFGNSWADHRSRIFSRIAGWLSGCAGKLKIAKDQISGVRTDLFLLKRLLDAVPQSAPSPDFIASISALDRFLEAAESSQDPAEQVRALYAFHLNAPAVRSIANKAVQRSDSQEWLIKELDAVDHLEFNKAFPFFSDTGKKKKKGANSNGAPSEEEYTETESIQQPEDAEQEVNGQEGNGASKNQKKFQRIPRFFGEGSRSEYRILTEAPQYFDMFCNNMRAIFMQLESQPRKAPRDFKCFLQNRLQKLYKQTFLNARSNKCRALLESVLISWGEFYTYGANEKKFRLRHEASERSSDPDYVVQQALEIARRLFLFGFEWRDCSAGERVDLVEIHKKAISFLLAITQAEVSVGSYNWLGNSTVSRYLSVAGTDTLYGTQLEEFLNATVLSQMRGLAIRLSSQELKDGFDVQLESSCQDNLQHLLVYRASRDLAACKRATCPAELDPKILVLPAGAFIASVMKMIERGDEPLAGAYLRHRPHSFGWQIRVRGVAEVGMDQGTALAFQKPTESEPFKIKPFSAQYGPVLWLNSSSYSQSQYLDGFLSQPKNWSMRVLPQAGSVRVEQRVALIWNLQAGKMRLERSGARAFFMPVPFSFRPSGSGDEAVLAPNRYLGLFPHSGGIEYAVVDVLDSAGFKILERGTIAVNGFSQKRGERQEEAHREKQRRGISDIGRKKPVQAEVDAANELHRKYTDVATRLGCRIVVQWAPQPKPGTAPTAQTVYARAVRTEAPRSGNQEDHARMKSSWGYTWSTYWEKRKPEDILGISTQVYWTGGIGESCPAVAVALLGHIRATSTQTEWEKEEVVFGRLKKFFPS

SEQ ID NO: 1122 - protein, 1287 aa, Candidatus Kerfeldbacteria
MKRILNSLKVAALRLLFRGKGSELVKTVKYPLVSPVQGAVEELAEAIRHDNLHLFGQKEIVDLMEKDEGTQVYSVVDFWLDTLRLGMFFSPSANALKITLGKFNSDQVSPFRKVLEQSPFFLAGRLKVEPAERILSVEIRKIGKRENRVENYAADVETCFIGQLSSDEKQSIQKLANDIWDSKDHEEQRMLKADFFAIPLIKDPKAVTEEDPENETAGKQKPLELCVCLVPELYTRGFGSIADFLVQRLTLLRDKMSTDTAEDCLEYVGIEEEKGNGMNSLLGTFLKNLQGDGFEQIFQFMLGSYVGWQGKEDVLRERLDLLAEKVKRLPKPKFAGEWSGHRMFLHGQLKSWSSNFFRLFNETRELLESIKSDIQHATMLISYVEEKGGYHPQLLSQYRKLMEQLPALRTKVLDPEIEMTHMSEAVRSYIMIHKSVAGFLPDLLESLDRDKDREFLLSIFPRIPKIDKKTKEIVAWELPGEPEEGYLFTANNLFRNFLENPKHVPRFMAERIPEDWTRLRSAPVWFDGMVKQWQKVVNQLVESPGALYQFNESFLRQRLQAMLTVYKRDLQTEKFLKLLADVCRPLVDFFGLGGNDIIFKSCQDPRKQWQTVIPLSVPADVYTACEGLAIRLRETLGFEWKNLKGHEREDFLRLHQLLGNLLFWIRDAKLVVKLEDWMNNPCVQEYVEARKAIDLPLEIFGFEVPIFLNGYLFSELRQLELLLRRKSVMTSYSVKTTGSPNRLFQLVYLPLNPSDPEKKNSNNFQERLDTPTGLSRRFLDLTLDAFAGKLLTDPVTQELKTMAGFYDHLFGFKLPCKLAAMSNHPGSSSKMVVLAKPKKGVASNIGFEPIPDPAHPVFRVRSSWPELKYLEGLLYLPEDTPLTIELAETSVSCQSVSSVAFDLKNLTTILGRVGEFRVTADQPFKLTPIIPEKEESFIGKTYLGLDAGERSGVGFAIVTVDGDGYEVQRLGVHEDTQLMALQQVASKSLKEPVFQPLRKGTFRQQERIRKSLRGCYWNFYHALMIKYRAKVVHEESVGSSGLVGQWLRAFQKDLKKADVLPKKGGKNGVDKKKRESSAQDTLWGGAFSKKEEQQIAFEVQAAGSSQFCLKCGWWFQLGMREVNRVQESGVVLDWNRSIVTFLIESSGEKVYGFSPQQLEKGFRPDIETFKKMVRDFMRPPMFDRKGRPAAAYERFVLGRRHRRYRFDKVFEERFGRSALFICPRVGCGNFDHSSEQSAVVLALIGYIADKEGMSGKKLVYVRLAELMAEWKLKKLERSRVEEQSSAQ

SEQ ID NO: 1123 - DNA, 74 bp, Artificial Sequence
  synthetic polynucleotide
tcagggcagagccatctattgcttacatttgcttctgacacaactgtgttcactagcaacctcaaacagacacc

SEQ ID NO: 1124 - DNA, 74 bp, Artificial Sequence
  synthetic polynucleotide
atggtgcacctgactcctgtggagaagtctgccgttactgccctgtggggcaaggtgaacgtggatgaagttgg

SEQ ID NO: 1125 - DNA, 712 bp, Artificial Sequence
  synthetic polynucleotide
tgtggagccacaccctagggttggccaatctactcccaggagcagggagggcaggagccagggctgggcataaaagtcagggcagagccatctattgcttacatttgcttctgacacaactgtgttcactagcaacctcaaacagacaccatggtgcacctgactcctgtggagaagtctgccgttactgccctgtggggcaaggtgaacgtggatgaagttggtggtgaggccctgggcaggttggtatcaaggttacaagacaggtttaaggagaccaatagaaactgggcatgtggagacagagaagactcttgggtttctgataggcactgactctctctgcctattggtctattttcccacccttaggctgctggtggtctacccttggacccagaggttctttgagtcctttggggatctgtccactcctgatgctgttatgggcaaccctaaggtgaaggctcatggcaagaaagtgctcggtgcctttagtgatggcctggctcacctggacaacctcaagggcacctttgccacactgagtgagctgcactgtgacaagctgcacgtggatcctgagaacttcagggtgagtctatgggacgcttgatgttttctttccccttcttttctatggttaagttcatgtcataggaaggggataagtaacagggtacagtttagaatgggaaacagacgaatgatt

SEQ ID NO: 1126 - DNA, 168 bp, Artificial Sequence
  synthetic polynucleotide
tcagggcagagccatctattgcttacatttgcttctgacacaactgtgttcactagcaacctcaaacagacaccatggtgcacctgactcctgaagagaagtctgcggttactgccctgtggggcaaggtgaacgtggatgaagttggtggtgaggccctgggcaggt

SEQ ID NO: 1127 - RNA, 102 nt, Artificial Sequence
  synthetic polynucleotide
  misc_feature (1)..(3): Nucleotides at positions 1 to 3 have 2'O-methyl phosphoorothioate protection
  misc_feature (100)..(102): Nucleotides at positions 100 to 102 have 2'O-methyl phosphoorothioate protection
cuugccccacagggcaguaaguuuuagagcuagaaauagcaaguuaaaauaaggcuaguccguuaucaacuugaaaaaguggcaccgagucggugcuuuuuu

SEQ ID NO: 1128 - RNA, 20 nt, Artificial Sequence
  synthetic polynucleotide
cuugccccacagggcaguaa

1. A method of modifying a globin gene in the genome of a hematopoietic stem/progenitor cell (HSPC), the method comprising:
A) obtaining HSPCs from an individual having a globin gene comprising a sickle cell disease (SCD)-associated single-nucleotide polymorphism (SNP), wherein said obtaining comprises:
a) administering to the individual an amount of a stem cell mobilization agent effective to mobilize CD34⁺ HSPCs; and
b) collecting the mobilized CD34⁺ HSPCs from the individual, thereby generating an in vitro population of CD34⁺ HSPCs;
B) contacting the in vitro population of CD34⁺ HSPCs with a genome editing composition comprising:
a) a ribonucleoprotein (RNP) complex comprising:
i) a class 2 CRISPR/Cas effector polypeptide, or a nucleic acid comprising a nucleotide sequence encoding the class 2 CRISPR/Cas effector polypeptide; and
ii) a guide RNA; and
b) a donor DNA template comprising a nucleotide sequence that provides for correction of the SCD-associated SNP in the globin gene,
thereby generating an in vitro mixed population, wherein at least 2% of the SCD-associated SNPs are corrected in the in vitro mixed population.

2. The method of claim 1, wherein the class 2 CRISPR/Cas effector polypeptide is a type II CRISPR/Cas effector polypeptide.

3. The method of claim 2, wherein the class 2 CRISPR/Cas effector polypeptide is a Cas9 protein and the corresponding CRISPR/Cas guide RNA is a Cas9 guide RNA.

4. The method of claim 1, wherein the class 2 CRISPR/Cas effector polypeptide is a type V or type VI CRISPR/Cas effector polypeptide.

5. The method of claim 4, wherein the class 2 CRISPR/Cas effector polypeptide is a Cpf1 protein, a C2c1 protein, a C2c3 protein, or a C2c2 protein.

6. The method of claim 4, wherein the class 2 CRISPR/Cas effector polypeptide is a Cas12 enzyme.

7. The method of claim 4, wherein the class 2 CRISPR/Cas effector polypeptide is a Cas13 enzyme.

8. The method of claim 1, wherein the class 2 CRISPR/Cas effector polypeptide is a high-fidelity variant.

9. The method of claim 1, wherein the guide RNA comprises one or more nucleic acid modifications.

10. The method of claim 9, wherein the first three nucleotides at the 5′ end of the guide RNA comprise nucleic acid modifications.

11. The method of claim 10, wherein the nucleic acid modifications comprise one or more of a modified nucleobase, a modified backbone or non-natural internucleoside linkage, a modified sugar moiety, a Locked Nucleic Acid, and a Peptide Nucleic acid.

12. The method of claim 1, wherein the stem cell mobilization agent is plerixafor.

13. The method of claim 1, wherein the SCD-associated SNP is an A-to-T substitution at position 170 of the nucleotide sequence depicted in FIG. 15.

14. The method of claim 1, wherein the donor DNA template comprises the nucleotide sequence
(SEQ ID NO: 1126)
5′-tcagggcagagccatctattgcttacaTTTGCTTCTGACACAACTGTG
TTCACTAGCAACCTCAAACAGACACCATGGTGCACCTGACTCCTgaaGAGA
AGTCTGCGGTTACTGCCCTGTGGGGCAAGGTGAACGTGGATGAAGTTGGTG
GTGAGGCCCTGGGCAGGT-3′.

15. The method of claim 1, wherein the guide RNA targeting segment comprises the nucleotide sequence 5′-CUUGCCCCACAGGGCAGUAA-3′ (SEQ ID NO: 1128).

16. The method of claim 1, wherein 2% to 50% of the SCD-associated SNPs in the in vitro mixed population have been corrected.

17. The method of claim 16, wherein 35% of the SCD-associated SNPs in the in vitro mixed population have been corrected.

18. The method of claim 1, wherein from 2% to 25% of the SCD-associated SNPs in the in vitro mixed population have been corrected.

19. The method of claim 1, wherein from 2% to 20% of cells of the in vitro mixed population comprise only one corrected SCD-associated SNP.

20. The method of claim 1, wherein from 2% to 20% of cells of the in vitro mixed population comprise two corrected SCD-associated SNPs.

21. A method of treating sickle cell disease (SCD) in an individual, the method comprising:
a) modifying a globin gene in the genome of a hematopoietic stem/progenitor cell (HSPC) obtained from the individual according to the method of claim 1, thereby generating an in vitro mixed population, wherein at least 2% of the SCD-associated SNPs are corrected in the in vitro mixed population; and
b) administering the in vitro mixed population to the individual, thereby treating the SCD in the individual.

22.-41. (canceled)

42. A kit for treating sickle cell disease (SCD) in an individual, the kit comprising:
A) a stem cell mobilization agent that provides for mobilization of hematopoietic stem cells; and
B) a genome-editing composition comprising:
a) a ribonucleoprotein (RNP) complex comprising:
i) a class 2 CRISPR/Cas effector polypeptide, or a nucleic acid comprising a nucleotide sequence encoding the class 2 CRISPR/Cas effector polypeptide; and
ii) a guide RNA; and
b) a donor DNA template comprising a nucleotide sequence that provides for correction of an SCD-associated single nucleotide polymorphism in a globin gene.

43.-56. (canceled)
